United States Patent Application Publication US 2009/0199308 A1 - sequence listing, part 3

SEQ ID NO: 10398 - protein, 299 aa, Glycine max
  misc_feature (24)..(24): Xaa can be any naturally occurring amino acid
  misc_feature (108)..(108): Xaa can be any naturally occurring amino acid
  misc_feature (227)..(227): Xaa can be any naturally occurring amino acid
MAATTLVFEGTLPSSGGDQKRAVXGLNTYPKATIAVTTKDAVLEAIKQGYRHLYAASAYGEEQSVGEAISEALKQGLIASRDQLFITTKLWVTDNHAHTMTSALQNSXCRTLQLEYIDLFLIHWPIATKPGKVVYPIEVSEIVEFDMKGVWGSMEECQRLGLTKAIGVSNFSIKKLEKLLSFATIPPAVNQVEVNLGWQQQKLRDFCKEKGITVIFVSPLFSCSKNXNQFFLQICLRWLYEQGLTFVVKSYDKERMKQNLGIFDWSLTEDDYKKISEIHQERLIKGPTKPLLDDLWDEE

SEQ ID NO: 10399 - protein, 669 aa, Triticum aestivum
  misc_feature (458)..(458): Xaa can be any naturally occurring amino acid
  misc_feature (473)..(473): Xaa can be any naturally occurring amino acid
  misc_feature (480)..(480): Xaa can be any naturally occurring amino acid
  misc_feature (502)..(502): Xaa can be any naturally occurring amino acid
  misc_feature (549)..(549): Xaa can be any naturally occurring amino acid
  misc_feature (586)..(586): Xaa can be any naturally occurring amino acid
  misc_feature (612)..(612): Xaa can be any naturally occurring amino acid
  misc_feature (618)..(618): Xaa can be any naturally occurring amino acid
MNADYGAPTELAGPLQQRRALYQPRLPPCLQGATVRVEYGDATTTIDPTGAHAVAQAFPRTYGQRLVTFLAPDDTAGAGKAVNERPPIRVGVVFSGRQSPGGHNVVWGLHDALKVYNPQSILYGFIGGTEGLFANKTLEITNDVLASYKNQGGFDLLGRSIDQIRSSKQVSAAMTTCQDLNLDGLVIVGGVTSNSDAAQLAETLVQKNCKTKVVGVPVSLNGDLKNQFVETTVGFDTVCKVNSQLISNVCLDAISAGKYYYFVRLMGRKASHVALECALQSHPNMLIMGEEVALSKLTLMEVINKICDGVQARAELGKHHGVLLIPEGLIESIPEMYALIQEISILHNNNVPVTEIPTQVSPWAAALFQFLPPFIRRELLLHQESDNSAQLSQIDTEQLLAHLVEAEMIKRTKEGRYKGKKFSSVCHFFGYQARGSLPSNFDCDYAYVLGHISLHMIXAGLTGYMATVANLKXPIHKWRXSCCPITAMMSVRRLLRGPGPFXYGKPAIHPSPIDLKGKAYELLREKASSFLLDDFYRTPGGIQFEGPGXDAKPITLTIEDQDYMGDIEMLKLYLDKVKTIVNPVAXRDTLKSGDNSMISMTHVLTVMSQPSXMLTALXHFLSLEHQRIIYNWFLDTRFRFPFPKLNTHPICQQTWEYILIPGFLYFVQR

SEQ ID NO: 10400 - protein, 325 aa, Triticum aestivum
  misc_feature (130)..(130): Xaa can be any naturally occurring amino acid
MAWWAGSMGGLDLRNHLAQFGGPAAGGAAMGGAEQAPTTPNSSGSNNHDDSSGAAQDSPTAGAGDNSPNPNAAISGSGPSGGGGGSGGGGSSSGRRPRGRPAGSKNKPKPPIIITRESPNTLRSHVLEIXSGADIMEAVSTFARRRQRGVSVLSGSGVVGNVTLRQPAAPPGSVVTLHGRFEILSLSGAFLPSPCPPGATGLAVYLAGGQGQVVGGTVIGELVASGPVMVVAATFSNATYERLPLADEEPGEAAAAATGSDGMQLPDGPAPGGNGGMGAAVGVPGLPDPSSMPFYNLPPNLQMPNGGGQMAHDVFGSFRPPPPAF

SEQ ID NO: 10401 - protein, 157 aa, Bacillus halodurans C-125
MSIHEFSARLINGEEKALSDYKDQVLLIVNTASKCGLTPQYEELQILYETYKDQGFTVLGFPSNQFMNQEPGDHNEIAAFCERNYGVSFPIFEKVKVNGKEAHPLFQYLTSQQGGLFTEKIKWNFTKFLIDRSGNVVKRYAPSTSPIKIKDDIEELL

SEQ ID NO: 10402 - protein, 205 aa, Triticum aestivum
MGERLKGTVKWFNVTKGFGFISPEDGSEDLFVHQSAIKADGYRSLNENDVVEFEVITGDDGRTKATDVTAPGGGALAGGSRPSEGGGDRGGRGGGGYGGGGYGGGGGGYGGGGGGYGGGGGSYGGGGGYGGGGGGGRYGGGSGGGRECYKCGEEGHISRDCPQGGGGGGGGYGGGGGRGGGGGGGGCFSCGESGHFSRECPNKTN

SEQ ID NO: 10403 - protein, 112 aa, Zea mays
  misc_feature (24)..(24): Xaa can be any naturally occurring amino acid
  misc_feature (40)..(40): Xaa can be any naturally occurring amino acid
  misc_feature (83)..(83): Xaa can be any naturally occurring amino acid
TYAYAYAYACKPLLQLTTHATRGXYLCMFLVGAYQEVPRXLHNLFGGPSVVRVSQCDWPHCFAVTPVPAGPYCADMLLAMHHXPEVMYEVLKQMTDCATVVVLARAFSAMPY

SEQ ID NO: 10404 - protein, 421 aa, Lotus corniculatus var. japonicus
MNHCVVLCIIVVGFFFFFFLSQFVMQIKREISIMKLVRHPYVVRLYEVLASRTKIYIILEFITGGELFDKIIRHGRLSEAESRRYFQQLIDGVDYCHSKGVYHRDLKPENLLLDSLGNIKISDFGLSALPEQGVSILRTTCGTPNYVAPEVLSHKGYNGAVADVWSCGVILYVLLVGYLPFDELDLTSLYSKIEKAEYSCPPGFPVGAKTLIHKILDPNPETRITIEQIRNDEWFQRGYVPVSLLEYEDVNLDDVNAVFDDAEEQRANQQCDHEDMGPLMLNAFDLIILSQGLNLAAIFDRGQDSMKYQTRFITQKPAKVVLSSMEVVAQSMGFKTHIRNYKMRVEGLSAKKTSHFSVMLEIFEVAPTFYMVDIQKAAGDAGEYLKFYKNFCGNLEDIIWKPPHESTKSKVSKTRSKRRSR

SEQ ID NO: 10405 - protein, 472 aa, Arabidopsis thaliana
MSTASVIIIGAGISGISAAKVLVENGVEDVLILEATDRIGGRIHKQNFGDVPVELGAGWIAGVGGKESNPVWELASRFNLRTCFSDYTNARFNIYDRSGKIFPTGIASDSYKKAVDSAILKLKSLEAQCSGQVAEEAPSSPKTPIELAIDFILHDFEMAEVEPISTYVDFGEREFLVADERGYECLLYKMAEEFLVTSHGNILDYRLKLNQVVREVQQSRNGVVVKTEDGSVYEANYVIVSASIGVLQSDLLSFQPLLPRWKTEAIQKCDVMVYTKIFLKFPQCFWPCGPGQEFFIYAHEQRGYFTFWQHMENAYPGSNILVVTLTNEQSKRVEAQSDQETMKEAMSVLRDMFGATIPYATDILVPRWWNNRFQRGSYSNYPMISDNQLLQNIKAPVGRIFFTGEHTSEKFSGYVHGGYLAGIDTSKSLLEEMKQSLLLQPLLAFTESLTLTHQKPNNSQIYTNVKFISGTS

SEQ ID NO: 10406 - protein, 211 aa, Zea mays
MACKPSPHFLSPHPHSQSRMPRMMCRVALAAVLLCAAAAAALGGKRAPIPDDLRDVIDDEEDDEWRRYGAPPSRGPGRGDGPPPDLSRMDPAALQDELLRGQTGPSFGFVKLRPGTARSQEDVVGIATRWSNVLRTGSVDAKFVAVNFGTLMFTMERGRDILELKEFILSQDEAYEFKVGDRVFRRPGDPPLDQVLDKPQKKKRHKSRDEL

SEQ ID NO: 10407 - protein, 366 aa, Pseudomonas aeruginosa PAO1
MSKMMKAAVFIQPGRIELVDKPIPDVGPNDALVRITTTTLCGTDVHILKGEYPVAPGLTVGHEPVGIIEKLGSAVVGYREGQRVIAGAICPNFNSYAAQDGVPSQDGSYLVESGRCACHGYKATAGWRFGNLIDGTQAEYVLVPDAQANLAPIPDGLSDEQVLMCPDIMSTGFKGAENANIRIGDSVAIFAQGPIGLCATAGARLLGASTIIAIDGNAHRLDIARGMGADVTLNFRECDVIEEILKLTGGRGVDASIEALGTQSTFETALRVLKPGGTLSSLGVYSEDLTIPLSAFAAGLGDHRINTALCPGGKERMRRLLNIVASGRVNLGPLVSHEYRLDDIVAAYDLFANQRDNVLKVAIKPH

SEQ ID NO: 10408 - protein, 365 aa, Lotus corniculatus var. japonicus
MVEQIKREISIMKIVRHPNIVRLHEVLSSQTKIYIILEFVMGGELYDRIVQRGKLSEDESRRYFQQLIDAVAHCHKKGVYHRDLKPENLLLDAFGNLKVSDFGLSALTKQGVDLLHTTCGTPSYVAPEVLSNQGYDGAAADVWSCGVILYVLKAGYLPFEEADLSTLYRRRVKIGEIRKDPWFQRNYLPLKLNEDEQVNLDDVQAVFDDIEDQYVPVQSEITEGGPLVMNAFEMITLSQGLNLSPLFDRHQDYVKRQTRFVSRKPAKVIISSIKVVAESMGLKLQSRNYKMRIEGLSANKAGQFAVVLEVYEVAPCLYMVDVRKAAGDTLDYHKFYKNLCAKLENIIWRPTETMPDSGLLRQMTL

SEQ ID NO: 10409 - protein, 125 aa, Triticum aestivum
  misc_feature (69)..(69): Xaa can be any naturally occurring amino acid
  misc_feature (84)..(84): Xaa can be any naturally occurring amino acid
  misc_feature (91)..(91): Xaa can be any naturally occurring amino acid
  misc_feature (102)..(102): Xaa can be any naturally occurring amino acid
  misc_feature (108)..(108): Xaa can be any naturally occurring amino acid
MAPTVMASSATSVAPFQGLKSTAGLPVSRRSNGASLGSVSNGGRIRCMQVWPIEGIKKFETLSYLPPLXTEGLLKQVDYLIRSXKWVPCLXFNKVGFIFREXNASPGXYDGRVGNVGKLNVSGGT

SEQ ID NO: 10410 - protein, 275 aa, Dechloromonas aromatica RCB
MQTSPSTTLQQQDLSIAGPAGPLALRLYRPSLARVVLPVVLYFHGGGFVGGSLDDADAAAGFIAEHTPALVVAVDYALAPARPFPAAPEDAHAAALWTAAHAAELGGDPARLAVAGDDAGGNLAAALTLIARDRNGPAIAAQALVGPMLDPSMTRLGDGVRLNSDLSAATCASCYSQYLPQSRQRLHPYASPLASVRQAGLPPALIVTAECDVLHNEAEKYAAALIAAGVPTQVVRFAGVNHATLASHRPALAEIAHFLRRRLWDAEAPAHPLNL

SEQ ID NO: 10411 - protein, 162 aa, Triticum aestivum
  misc_feature (126)..(126): Xaa can be any naturally occurring amino acid
  misc_feature (145)..(145): Xaa can be any naturally occurring amino acid
MSDSEDHHFESKADAGASKTYPMQAGAIRKGGFLVIKNRPCKVVEVSTSKTGKHGHAKCHFVALDIFNGKKLEDIVPSSHNCDVPHVDRQDYQLIDITDDGYVSLLTESGNTKDDLKLPTDDVLLXQIKTGFADGKDLILSVMSXPMGEEQICAVKEIGGGK

SEQ ID NO: 10412 - protein, 188 aa, Glycine max
MADSDNDSGGAHNAGKGSEMSPREQDRFLPIANVSRIMKKALPANAKISKDAKETVQECVSEFISFITGEASDKCQREKRKTINGDDLLWAMTTLGFEDYVEPLKGYLQRFREMEGEKTVAARDKDAPPPTNATNSAYESPSYAAAPGGIMMHQGHVYGSAGFHQVAGGAIKGGPVYPGPGSNAGRPR

SEQ ID NO: 10413 - protein, 250 aa, Oryza sativa (japonica cultivar-group)
MAKNYPVVSAEYQEAVEKARQKLRALIAEKSCAPLMLRLAWHSAGTFDVSSKTGGPFGTMKTPAELSHAANAGLDIAVRMLEPIKEEIPTISYADFYQLAGVVAVEVSGGPAVPFHPGREDKPAPPPEGRLPDATKGSDHLRQVFGAQMGLSDQDIVALSGGHTLGRCHKERSGFEGPWTRNPLQFDNSYFTELLSGDKEGLLQLPSDKALLSDPAFRPLVEKYAADEKAFFEDYKEAHLKLSELGFADA

SEQ ID NO: 10414 - protein, 183 aa, Shigella flexneri 2a str. 301
MKKLIVSSVLAFITFSAQAAAFQVTSNEIKTGEQLTTSHVFSGFGCEGGNTSPSLTWSGAPEGTKSFAVTVYDPDAPTGSGWWHWTVANIPATVTYLPTDAGRRDGTKLPTGAVQGRNDFGYAGFGGACPPKGDKPHHYQFKVWALKTDKIPVDSNSSGALVGYMLNANKIATAEITPVYEIK

SEQ ID NO: 10415 - protein, 487 aa, uncultured bacterium 561
MNIELTNPTLFRTEAYVNGEWIGADNGARLPVTNPATGALITDVAKTGAAETRRAIAAAETAMLSWRQKPAKQRAQVMRRWFDLIMANQEDLARIMTLEQGKTLAESRGEVAYGASYIEWFAEQAKRIDGDVIPAPSGDKRIICIKQPVGVCAAITPWNFPNAMITRKAAPALAAGCTIVIKPASETPLSALALAELAHQAGIPPGVLNVLAGSSSDIGAELTSNPTVRKLSFTGSTPIGKMLEAQCVPTLKKTSMELGGNAPFIVFDDADIDSAVQGALISKYRNSGQTCVCSNRLLVQAGIAEEFTAKLVAATESLKLGNGLDENVDLGPLVNAKAVNDVHELVQGSISAGAKLVLGGAPSNLGVCFYQPTILTGVRPEMPVFRNEIFGPVAPIISFETEAEAIELANDTEFGLASYFYTRDIGRVWRVAEALEYGIVGINEGIISNEMAPFGGVKESGSGREGSKYGIDDYLEIKYMLMGGLNQ

SEQ ID NO: 10416 - protein, 189 aa, Pseudomonas fluorescens PfO-1
MPDMLKRWCAVPALLMALTGLAQAADCPDLLQGSLPKLRAKESIDLCQRYADKPLVVINTASFCGFAPQFEGLEALNQRYKAQGLEMLGVPSNDFKQESKDSAETAKVCYANYGVTFTMTEPQKVRGDDATHLFQVLARQSSAPKWNFYKYVIDRQGKVIANFSSLTKPDDPEFLAAIEKAIASQSLKP

SEQ ID NO: 10417 - protein, 426 aa, Rubrobacter xylanophilus DSM 9941
MLDGKEQVAEIEREWGSERWEGIERPYAAEDVYRLRGSVRIEHTLARMGAERLWRLIHERPFVRALGALTGNQAVQQVKAGLEAIYVSGWQVAADANLANHTYPDQSLYPANSAPNLVRRINQALQRADQIHHAEGKNGVYWFAPIVADAEAGFGGALNVFEITKAMIEAGAAGVHFEDQLASEKKCGHMGGKVLLPTAQAIRNLIAARLAADVMGVPTVLIARTDGDAANLLTSDVDPADEPFLTGERTVEGFYRVKPGLEQAIARGLAYAPYADMVWCETSTPDLGEAREFAEAIHERFPGKPLAYNCSPSFNWKRYLSPEEMLTFQEKLGEMGYKFQFVTLAGFHSLNYSMFELSRQYGERGMAAYSELQEAEFAAEKHGYTATKHQREVGAGYFDEVAQVVAGGMASTTALTGSTEEAQFND

SEQ ID NO: 10418 - protein, 414 aa, Sulfolobus tokodaii str. 7
MAISLAKKYQGKLEIMPKIPIRSYEDFALIYTPGVAELVKEIQKDENQSFELTSRWNTIAILTDGSRVLGLGNVGPIASLPVMEGKALLFKFLGGVDAFPLPIKVSDKEEFIQVAKAIEPAFGGINLEDIESPKCFFILEELQKTLNIPVWHDDQQGTAGAVLAGLINAIKITGKDKNSKIVLMGAGAANIATAQLLIKYGFNPKNMILIDKEGPLYAERGDVDSLMFKHPWKYELAIQTNSERVKTIEEAFKGADILIAASSPEVRIDKKLIRMMNKPIVFALANPIPEIYPNEAKEAGAVIVATGRSDFPNQVNNSLIFPAVFRGVLDSRAKKITDEMIIAAAEELAKYAEEKGLREDYIIPRMDEIEVYYRMAAAVATKAVELGYARLKLSYREFLESAKERILRARRLSL

SEQ ID NO: 10419 - protein, 146 aa, Mesembryanthemum crystallinum
SVWRAINKQTGEVVAIKKMKKKYYSWEECINLREVKSLRKMSHPNIVKLKEVIREHDILHFVFEYMECNLYQLMKDRGRPFSEVEVRNWCFQVFQGLAYMHQRGYFHRDLKPENLLVSKDLIKVADFGLAREISSAPPYTEYVSTR

SEQ ID NO: 10420 - protein, 454 aa, uncultured bacterium 561
MLLGQAMTAMIYPTTNPAATEVMVVSRGEGPYIYDQAGKQYLEGMAGLWCTSLGYGNQEIIETATRQMEQLSFSHMFSGKTHPSAIELADKLAAMAPIDDARVFLGASGSDANDTLVKLIRYYAVASGQPDRVKIIARDKGYHGVSVASAALTGLHANHAHFQLPFDALGVLRTGAPHYYRCAEAGETEADFVARRASELEALILDEGPDTIAAMIAEPVNGAGGVIIPPEGYFEAVQAVLDKYGIMLWDDEVICGFGRLGAAFGAEKLNMKPRMMACAKALTSAYVPLSAAIVAGDIADAIAGPAADMGVFGHGYTYSGHPLGCAVASKVLDIYVRDRLFEHAATLGAYMSKRLDEFSDHPLVGEVSAMGLLGALELVANKDSKQPFEGMRVAQFCAKAAEDNGLIIRPLGGNRMALCPPLIIQEAHVDEIMDKLSRALDSTLDFVTAEGLTV

SEQ ID NO: 10421 - protein, 344 aa, Brassica napus
  misc_feature (330)..(330): Xaa can be any naturally occurring amino acid
RPTRPRTRRPTRPRDRIGGRVHTDYSFGFPVDLGASWLHGVCKENPLAPVIGRLGLPLYRTSGDNSVLYDHDLESYALFDMDGNQVPQELVTNVGITFEQILEEINKVRDEQDADMSISQAFSIVFSRKPELRLEGLAHNVLQWYLCRMEGWFAADADTISAKCWDQEELLPGGHGLMVRGYRPVINTLAKGLDIRLNHRVTKIVRQYNGVKVTTEDGQTFVADAAVIAVPLGVLKSGTITFEPKLPEWKQEAINDLGVGIENKIILHFEKVFWPKVEFLGVVAETSYGCSYFLNLHKATGHPVLVYMPAGQLAKDIEKMSDEAAANFAXVLQLQRILPDALLR

SEQ ID NO: 10422 - protein, 247 aa, Zea mays
  misc_feature (94)..(94): Xaa can be any naturally occurring amino acid
  misc_feature (208)..(208): Xaa can be any naturally occurring amino acid
  misc_feature (224)..(224): Xaa can be any naturally occurring amino acid
ATNSNARGSGAEMQGGATAKLQSPVTVMRPVRGDLEEHLPKPYLARALVAPDIYHPDGTAADEHGHHHMSVLQQHVAFFDRDDNGIIYPWETYXGCRALGFNMILSLLIALVVNGTMSYATLPGWLPSPLFPIYVHNIHKSKHGSDSGTYDNEGRFMPVNFENLFSKYARTSPDRLTYRELWSMTEGFRDAFDLYGWIAAKLEWTILXYVLARDDEGYLSREAXGRVYDGSLFEYVERQRAQHAKMS

SEQ ID NO: 10423 - protein, 352 aa, Haemophilus somnus 2336
MSINFVKEGNIMSKYVRSVCLVEPKKVDIKTVLYPKKGECDVLIKVESIGICGSDIGAFRGTNPLVTYPRILGHEIVGTVIEAGVGMPKNINIGDRVILEPYIYCGHCYPCSISRTNCCEALKVLGVHIDGAMQEIVRHPAHMLIKAPDIPIHELALAEPLTISLHAIRRTKVKAGEHVAIIGAGAIGLMAALVAKAYGATPILIDILDKRLDYAKSIGIPNIINPAKENDLEAIKSITNGRMAEVVIEASGANIAVQNTLKYTSFAGRIALTGWPKNETPLPTNLITFKELNIYGARTSKGEFEEALKLLESRKIEPKNIISKVITFDEIPHYIEELSENPDDYLKIIAVF

SEQ ID NO: 10424 - protein, 375 aa, Haloarcula marismortui ATCC 43049
MSGFVFNEKPIQIERGDGAYVYDDSGTEYLDMGASYACVPLGHKHPAVHSAVSEQLEKITYVQASYPNAERTALYDLLAKTAPDPIDKTWLCNSGTEANEAALKFARSATGNSKIVATMQGFHGRTMGALATTWKNKYKKPYEPLIGDVEFVPYDDSEALEEAVDEDTAAFIVEPVQGEGGINPTSDGYLEDAREITEDAGAALIFDEVQTGMGRTGALWNSQRAAVAPDMITAAKGLGNGLPIGATLCRDWIAEDYGSHASTFSGGPVISAAAGATVSTIIEDSVPGNAAVIGDYLLTELEAAIGDDVRDIRGEGLMIGVEVGRGANAALKKLALNHQVLALPAGRTVIRLLPPLTIDKDHADAVVDAMAEVVE

SEQ ID NO: 10425 - protein, 308 aa, Pseudomonas fluorescens PfO-1
MTSKLEQLKQFTTVVADTGDFEAIARVKPVDATTNPSLLLKAAAIPAYAELLNASVRDCKGDVGLASDRFGVAVGQEILKVIPGRISTEVDARLSFDQDAVLKRAHRLIELYDKAGVGRDRVLIKIASTWEGIRAAEILEKEGIQTNLTLLFSFAQAAACADAGVFLISPFVGRIYDWYKKANGNDYTGADDPGVQSVTRIYNYYKANDYKTVVMGASFRNLSQIEQLAGCDRLTISPDLIEKLAADTGKLERKLAPGHAGEARLSLNEAQFRWLSNEDAMATEKLAEGIRQFARDQEKLEALLQAKL

SEQ ID NO: 10426 - protein, 290 aa, Saccharomyces cerevisiae
TLVHVASVEKGRSYEDFQKVYNAIALKLREDDEYDNYIGYGPVLVRLAWHISGTWDKHDNTGGSYGGTYRFKKEFNDPSNAGLQNGFKFLEPIHKEFPWISSGDLFSLGGVTAVQEMQGPKIPWRCGRVDTPEDTTPDNGRLPDADKDAGYVRTFFQRLNMNDREVVALMGAHALGKTHLKNSGYEGGGANNVFTNEFYLNLLNEDWKLEKNDANNEQWDSKSGYMMLPTDYSLIQDPKYLSIVKEYANDQDKFFKDFSKAFEKLLENGITFPKDAPSPFIFKTLEEQGL

SEQ ID NO: 10427 - protein, 255 aa, Triticum aestivum
  misc_feature (141)..(141): Xaa can be any naturally occurring amino acid
SVGRLVMEASARSNLKPVSLELGGKSPLIVFDDADVDMAVGLAISANFFNKGEACVAASRVYLQEGIYDGFVKKLAQRMESWVVGDPFDPRVNQGPQVDKVQYERVLSYINHGKREGATVLTGGKPCGQSGYYIEPTVFTXDVKDDMIIAKEEIFGPVMCLMKFTSVEEAIARANDTRYGLAAGVVTKDINVANRMGRSIRPGVVWVNWYFAMDSDCPFGGRKMSGFGKDDGMHALDKFLAVKSVVTPVYDSPWL

SEQ ID NO: 10428 - protein, 289 aa, Saccharomyces cerevisiae
LVHVASVEKGRSYEDFQKVYNAIALKLREDDEYDNYIGYGPVLVRLAWHISGTWDKHDNTGGSYGGTYRFKKEFNDPSNAGLQNGFKFLEPIHKEFPWISSGDLFSLGGVTAVQEMQGPKIPWRCGRVDTPEDTTPDNGRLPDADKDAGYVRTFFQRLNMNDREVVALMGAHALGKTHLKNSGYEGGGANNVFTNEFYLNLLNEDWKLEKNDANNEQWDSKSGYMMLPTDYSLIQDPKYLSIVKEYANDQDKFFKDFSKAFEKLLENGITFPKDAPSPFIFKTLEEQGL

SEQ ID NO: 10429 - protein, 178 aa, Glycine max
  misc_feature (86)..(86): Xaa can be any naturally occurring amino acid
MAYSMISSPSVTTVNRACAGMAAPYTGLKFMAGFPTRMTNNDITCIASLCGILQCMQVWSPICKTNSETLSYLPDLDDSHSPEELXYLLRKGWIPCLQFELEHGFVYREHNRSPGYYDGRYWTMWKLPMFGCTDASQVLKELQEAKTAYPNGFIRIIGFDNVRQVQCISFIAYQLPGF

SEQ ID NO: 10430 - protein, 446 aa, Lotus corniculatus var. japonicus
MKKVRRRIGKYEVGRTIGEGTFAKVKFAKNSETGESVAIKIMDKTTILKHRMVEQIKREISIMKIVRHPNIVRLHEVLSSQTKIYIILEFVMGGELYDRIVQRGKLSEDESRRYFQQLIDAVAHCHKKGVYHRDLKPENLLLDAFGNLKVSDFGLSALTKQGVDLLHTTCGTPSYVAPEVLSNQGYDGAAADVWSCGVILYVLKAGYLPFEEADLSTLYRRTSAAEFVCPSWFSTGTTTLIHKILDPNPKTRVKIGEIRKDPWFQRNYLPLKLNEDEQVNLDDVQAVFDDIEDQYVPVQSEITEGGPLVMNAFEMITLSQGLNLSPLFDRHQDYVKRQTRFVSRKPAKVIISSIKVVAESMGLKLQSRNYKMRIEGLSANKAGQFAVVLEVYEVAPCLYMVDVRKAAGDTLDYHKFYKNLCAKLENIIWRPTETMPDSGLLRQMTL

SEQ ID NO: 10431 - protein, 442 aa, Streptomyces spectabilis
MSTTAMPASTHHTIALEQSHRLPGGQSMTDLSGLVVDRARNAEVWDKDGKRYIDFFTGVGVCNIGHSHPRFLAEVGEQLSACAVGTFYTDARSRYYELLAAQLPERLGRIHMFSTGSEAVEAAVKLARAATGKHEVVSFWGGFHGKTQGALSLHGGPRKHRSGPFPPGSHQVPYAYCYRCPLQLEHSTCGQRCVDLAEQSIENGSVGDIAAIIVEPVQGTNGNIIPPAGYLRAVRRLADRHGALLILDEVITGFGRTGSLFAFEQDPEVRPDVVVLGKAMASGVPASAIVSRAELVEGTSFGQPSAAASTFGGNPLASAAALATLRILLDERLPERSRLLGETVARRLASWKEEFPFVGNAANVGLMVGVELVEPGTRRPLPKDVTRRIFQGLLAEGVLAMAYDSRIRIYPPLSIPADHLDEGLTAFESVFRSLRSLRSTQT

SEQ ID NO: 10432 - protein, 355 aa, Lotus corniculatus var. japonicus
IVRLHEVLATKTKIYFIMDFVRGGELFAKVSKGRFGEDLSRRYFHQLISAVGYCHTRGVFHRDLKPENLLLDENGDLKVSDFGLSALRDQIRPDGLLHTLCGTPAYVAPEILAKRGYDGTKVDVWSCGVVLFVLAAGYLPFNDPNLMVMYRKIYNGEFRCPRWMSPDLRRFLSRLLDTNPETRITVDGMTRDPWFKKGYKEIKFHEEYRPESGSGSGSEVVDLNAFDIITFSSGLDLSRLFRQKEGEERLVVSGTPEKVLEMAEEVGAAEGMAVRWKKECGVELEGLNGDYGIGIDVSRLTAELAVVEVKMRGVDAVAFRNLWDEKLKPQLLGGATTSYHQEVEPESPESQVASD

SEQ ID NO: 10433 - protein, 254 aa, Triticum aestivum
MAAKCYPTVSDEYLAAVAKARRKLRGLIAEKNCAPLMLRLAWHSAGTFDVATKTGGPFGTMKCPAELAHGANAGLDIAVRLLEPIKEQFPILSYADFYQLAGVVAVEVTGGPEVPFHPGRQDKPEPPPEGRLPDATQGSDHLRQVFSTQMGLSDQDIVALSGGHTLGRCHKERSGFEGAWTANPLIFDNSYFTELLSGEKEGLLQLPTDKTLLTDPAFRPLVDKYAADEDAFFADYAEAHLKLSELGFGEAGCC

SEQ ID NO: 10434 - protein, 483 aa, Arabidopsis thaliana
MRRNVDNQSYYVLGHKTPNIRDLYTLSRKLGQGQFGTTYLCTDIATGVDYACKSISKRKLISKEDVEDVRREIQIMHHLAGHKNIVTIKGAYEDPLYVHIVIELCAGGELFDRIIHRGHYSERKAAELTKIIVGVVEPCHSLGVMHRDLKPENFLLVNKDDDFSLKAIDFGLSVFFKPGQIFKDVVGSPYYVAPEVLLKHYGPEADVWTAGVILYILLSGVPPFWAETQQGIFDAVLKGYIDFDTDPWPVISDSAKDLIRKMLCSSPSERLTAHEVLRHPWICENGVAPARALDPAVLSRLKQFSAMNKLKKMALKVIAESLSEEEIAGLRAMFEAMDTDNSGAITFDELKAGLRKYGSTLESTEIHDLMDAADVDNSGTIDYSEFIAATIHLNKLEREEHLVSAFQYFDKDGSGYITIDELQQSCIEHGMTDVFLEDIIKEVDQDNDGRIDYEEFVAMMQKGNAGVGRRTMKNSLNISMRDV

SEQ ID NO: 10435 - protein, 437 aa, Desulfuromonas acetoxidans
MSTLKEVLKQKIDAHRPRTTRLVKECGDTTLGEVTIAQAIGGARGIKCLVTDISYLDPMEGIRFRGMTIPETFAALPKVPGSDYPYVEGFWYLLLTGDVPTMEQTLEVVEDWKQRSQVPEYVIDVLRAMPRDSHPMAMFSAAIVAMQRDSVFASNYAAGKFNKMTCWEDMLEDSNDLMAKLGPIAAYIYRMKYKGDTHIAPDPELDMGGQFAHLIGQCDEYKDVARMYFILHSDHESGNVSAHTTHLVASALSDAYYSYAAGINGLAGPLHGLANQEVLAWTQNFMEKLGGKVPTKDELKAALWDTLNSGQVIPGYGHAVLRKTDPRYTSQREFCLNTPGLKEDPLFQLVAMIYEVAPDVLLEHGKAKNPWPNVDAQSGVIQWYYGLTEYDFYTVLFGVGRALGCLANITWDRALGYAIERPKSVTTAMLEDAAGIK

SEQ ID NO: 10436 - protein, 293 aa, Glycine max
MSNCLLTGYCLFRCSFLVYVAPIDTLFPKFKHYKFRHLPSTPTAARRRQKGAYFISLIITHTPTLIAMETGGFHGYRKLPNTTAGLKLSVSDMNMRQQVASSDHSAATGEENECTVREQDRFMPIANVIRIMRKILPPHAKISDDAKETIQECVSEYISFITGEANERCQREQRKTITAEDVLWAMSKLGFDDYIEPLTMYLHRYRELEGDRTSMRGEPLGKRTVEYATLGVATAFVPPPYHHHNGYFGAAMPMGTYVREAPPNTASSHHHHHHHHHHARGISNAHEPNARSI

SEQ ID NO: 10437 - protein, 260 aa, Triticum aestivum
  misc_feature (227)..(227): Xaa can be any naturally occurring amino acid
MAAGTGRVLPLLAVAAALAAALLYTAPFSKSLGGEGCSLLPHGHFWIASQRVVALGRVGPAAVEVKEGLINAIAVGDYRSFVLRRPLVDYGDAVIMPGLIDVHAHLDEPGRAEWEGFSTGTRAAAAGGITTLVDMPLNSFPSTVSEETLKLKVDAARDKLYVDVGFWGGLVPENALNPSKLESLLNAGVLGLKSFMCPSGINDFPMTNSTHIEEGLVTLAKYKRPLXLIHAERIPDVVSDEELDGYLKSRSYATYLKFRT

SEQ ID NO: 10438 - protein, 437 aa, Desulfuromonas palmitatis
MSTLKETLRKKIEEHRPRTTRLVKEFGDVKLGDVTISQAIGGARGIKCLVTDISYLDPMEGIRFRGKTIPETFAALPKVPGSDYPYVEGFWWMLLTGDVPTMEQTLEVVEDWKKRSQIPAYVIDVLRALPRDSHPMAMFSAAIVAMQRDSVFAKNYAAGKFNKMTCWEDMYEDANELMAKLGPIAAYIYRMKYKGDTHIPADPKLDMGGNFAHMMGVDKPYDDVARMYFILHSDHESGNVSAHTTHLVASALSDAYYSYAAGINGLAGPLHGLANQEVLAWTQNFMDKLGGKVPTKEELEKALWDTLNSGQVIPGYGHAVLRKTDPRYTSQREFCLKTPGLKEYPLFQLVSMIFEVAPDVLLKHGKAKNPWPNVDAQSGVIQWYYGVTEYDFYTVLFGVGRALGCLANITWDRALGYAIERPKSVTTAMLEDAAGIK

SEQ ID NO: 10439 - protein, 618 aa, Zea mays
MISPAMCRSAPRRAAQVRRLLSSAAPPAHAGAAVPGPCIVHKRGNDILHDPWYNKDTAFPMTERDRLGLRGLLPPRVMSFEQQYERFINSFRSLEHNTRGEPDSIVALAKWRILNRLHDRNETLYYRLLIDNIKDFAPIIYTPTVGLVCENYSGLFRRPRGMYFSAKDKGEMMSMIHNWPAEKVDMIVVTDGSRILGLGDLGVQGIGIPIGKLDVYVAAAGINPQKVLPIMLDVGTNNEKLLEDKLYLGLRQPRLEGEEYLAVVDEFMEAVHARWPKAVVQFEDFQMKWAFETLQRYRNRFCMFNDDVQGTAGVALAGLLGAVRAQGRPLQDFTNQKIVVVGAGSAGIGVLSMAKQAMLRMPGIHRTGEGHNQFWVLDKDGLITKARKDLDSAVARFARGFGPDEVPDLYEGASLVEVVKKVKPHVLLGLSGVGGIFNEEVLKAMKESDSPRPAVFAMSNPTTKAECTPDDVFKHVGDKAIFASGSPFSNVSLGNGKSGYANQANNMYLFPGIGLGALLSGARHVSDGMLQAAAECLASYITDDEIRKGILFPSVSSIRHITARVGAAVVRAAVAEDLAEGCCDVGPRELGSMSESEAVDYVARKMWYPIYSPLVSDK

SEQ ID NO: 10440 - protein, 326 aa, Archaeoglobus fulgidus DSM 4304
MKKIVVIPGDGIGKEVMEAAMLILEKLDLPFEYSYYDAGDEALEKYGKALPDETLEACRKSDAVLFGAAGETAADVIVRLRRELGTFANVRPAKAIEGIECLYPGLDIVVVRENTECLYMGFEFGFGDVTEAIRVITREASERIARYAFELAKREGRKKVTALHKANVMKKTCGLFRDVCREVAKDYPEIQYNDYYIDAACMYLVMDPFRFDVIVTTNMFGDIVSDLAAGLVGGLGLAPSANVGERTAIFEPVHGAAFDIAGKGIANPTAMILTACMMLRHFGYVEEAKKVEEAVEKTIKEGKKTPDLGGNLKTMEFANEVASLLD

SEQ ID NO: 10441 - protein, 497 aa, Glycine max
  misc_feature (396)..(396): Xaa can be any naturally occurring amino acid
MAALSNGHGSSFFKMPPIKFTKLFINGEFVDSLSGREFETRDPRTGEVITRIAEGAKEDVDVAVKAARAAFDYGPWPRMPGAERAKIMMKWADLVDQNIEEIAALDAIDAGKLYHWCKAVDIPAAASTIRYYAGAADKIHGEVLKASREFHAYTLLEPIGVVGHIIPWNFPSTMFVAKVSPSLAAGCTMVLKPAEQTPLSALFYAHLAKLAGIPDGVLNVVPGFGQTAGVAISLHMDIDKVSFTGSTEVGREVMRAAANSNLKPVSLELGGKSPVIVFDDADVDKAAELALLGILFNKGEICVAGSRVLVQEGIYDEFEKKLVEKAKAWVVGDPFDPKVQQGPQVDKFSSKSASAYKKTQTNGKKVLERGEIINYTRRQQVVEAKFKGQQFETNEXASPVMALMKFKTIEDAIKIANNTRYGLASGIVTKSLDTANTVSRSIRAGIVWINCYFAFGDDIPYGGYKMSGFGRDFGMEALHKYLQVKSVVTPIYNSPWL

SEQ ID NO: 10442 - protein, 338 aa, Triticum aestivum
  misc_feature (322)..(322): Xaa can be any naturally occurring amino acid
  misc_feature (325)..(325): Xaa can be any naturally occurring amino acid
  misc_feature (337)..(337): Xaa can be any naturally occurring amino acid
MKTLFILTILAMATTIATANMQVDPSGQVQWPQQQPFPQPQQPFSQQPQQIFPQPQQTFPHQPQQAFPQPQQTFPHQPQQQFPQPQQPQQPFPQQPQQQFPQPQQPQQPFPQQPQQQFPQPQQPQQPFPQPQQPQLPFPQQPQQPFPQPQQPQQPFPQLQQPQQPLPQPQQPQQPFPQQQQPLIQPYLQQQMNPCKNYLLQQCNPVSLVSSLVSMILPRSDCKVMRQQCCQQLAQIPQQLQCAAIHGIVHSIIMQQEQQQQQQQQQQQQQQQGIQIMRPLFQLVQGQGIIQPQQPAQLEVIRSLVLGTLPTMCNVFGPPECXTTXAPFASIVADIGXQ

SEQ ID NO: 10443 - protein, 172 aa, Zea mays
MAGIGRNMVAPLLVLNLIMYIIVIGFASWNLNHFINGQTNYPGVAGNGATFYFLVFAILAGVVGAASKLAGVHHVRAWRHDSLATNAASSLIAWAITALAFGLACKEIHIGGHRGWRLRVLEAFAFVIILAFTQLLYVLMLHTGLFGGSGGYRDHDYGVGGAAGEPKGVTRV

SEQ ID NO: 10444 - protein, 1027 aa, Chlamydomonas reinhardtii
MGCAQSTPVDQPARQQPQATQQKSVEPAVVKKPVEPARVEPKVEVPSTKPSEVPHVEKAQSINRGQPGDGSGPLQQPSPAMPGAKQGGTKERRAAAGSEAVRDQIRKLAVGGPQAKEEKEKIYEVSDSEDEELEDDPSERTTLSGDWYKPQEVTDAILEALKRNFVFKGIPQNHLVEVVGRMYGISFKSGAVVLQQGALPKQDDCMYYLQQGEAEVVISGGADASKNHGEERKVDGHTVRIPQKPGWLFGDVALLFHSPRTASVVAKTNITVWAMDRRTFLKFVMKHAQGARALRFLRKLPLLKGLSDNDLIRAASRMPQRMYEDGQPLIRIGERGDELFLIRYGKVRVFRPDGNGGRVEVAVLGRGQFVGERAVINDKLRSADCVAQGQVQVVVLKKREFMDLDNPLLAWMLDYDAVSAVIRSLPQFKGLKQEQMENILDRFDAREELMQGDTILNQGDMLEKLYVVKIGEIALFRNDERVEDPNFVHEIAGFSYFGETAITQTGKCPYTIRVASESLHLLSLPKRQVDSFMGRDTGLKNEEAVVAALKKSKFLANMTDPEFKELLKACEQTDYNPGEVIAVANSSVTNKIFLVKSGEVMVVAADLALPDTGEVDVRKLTGSERQRLLAGSIFNDKALNSPETASLEASLVAGTPCGIITFTTSDVERVMGGRAMSRSRNAMPGAAAAVEERKFPRVKFTELEFHRIIGTGQFGLVRVVRNIKTNEVYALKVMHKAPIVESKQIEHVINERKILEEACTHPFCVRLCGAYQDKASLYLLQEWVPGGELFHHLDVEGAFDEPTAMFYAANVLLALEFLHAKGIVYRDLKPENLLLDTQGYIKMADFGFAKYIGGDKTYTICGTPDYQAPEVIMRRGTTKAADYWALGVLIFEMLVGDPPFKSLTGDPWDTFRRTLSGRFYVPNFISDQAADLIFKLLQVNPDKRLGSDKRLGAEEIKRHRWFSRIDWRALEQKKLPSPFRPRVRNPLDTSNFDNFDNVDLEPPPVPADRAEKHSQQWELWDWIDDSK

SEQ ID NO: 10445 - protein, 477 aa, uncultured bacterium 561
MREYKQFYIDGEWVAPSAPSDFEVFDPATEEVCATISLGNETDVDKAVAAAKAAFETFSQTSVEERVALLERICEIYQRRLGDIAEAIRLEMGAPIKLASTAQAFAGLGHIAEAAKVLKTYAFTEDLGEHRVVKEPIGVCGLITPWNWPLNQVSCKVAPAIAVGCTMILKPSEIAPLSSYIYAEILHEAGVPAGVFNLVNGDGPTVGTALSVHPDVDMMSFTGSTRAGSLVAQNAAPTVKRVTQELGGKSPNIILEDADLEAAVTRGVLHMYNNTGQSCNAPSRMLVPRDKLAAAEAIAAKVTETMVTIGDTADDKTTMGPVVSKVQWDKIQGLINKGIEEGAKVVCGGAGLPDGIDRGYYVRPTVFSEVNNNMTVAREEIFGPVLTMIPYDSEEEAIKIANDTPYGLAGYVQGENIDHARQVASKIRAGNIHLNGASGGMDVPFGGFKQSGNGREWGSHGFTDYLEIKAIEGYSAA

SEQ ID NO: 10446 - protein, 475 aa, Staphylococcus aureus subsp. aureus MSSA476
MRDYTKQYINGEWVESNSNETIEVINPATEEVIGKVAKGNKADVDKAVEAADNVYLEFRHTSVKERQALLDKIVKEYENRKDDIVQAITDELGAPLSLSERVHYQMGLNHFVAARDALDNYEFEERRGDDLVVKEAIGVSGLITPWNFPTNQTSLKLAAAFAAGSPVVLKPSEETPFAAVILAEIFDKVGVPKGVFNLVNGDGAGVGNPLSEHPKVRMMSFTGSGPTGSKIMEKAAKDFKKVSLELGGKSPYIVLDDVDIKEAAKATTGKVVNNTGQVCTAGTRVLVPKKIKDAFLAELKEQFSQVRVGNPREDGTQVGPIISKKQFDQVQNYINKGIEEGAELFYGGPGKPEGLEKGYFARPTIFINVDNQMTIAQEEIFGPVMSVITYNDLDEAIQIANDTKYGLAGYVIGKDKETLHKVARSIEAGTVEINEAGRKPDLPFGGYKQSGLGREWGDYGIEEFLEVKSIAGYFK

SEQ ID NO: 10447 - protein, 160 aa, Bacillus subtilis subsp. subtilis str. 168
MSIYHMKVRTITGKDMTLQPFAGKVLMIVNTASKCGFTSQLKQLQELYDTYQQEGLEILGFPCNQFMNQEPGEEADIQEFCETNYGVTFPMFSKVDVNGKNAHPLFVYLTEHAKGMLGTKAIKWNFTKFIVDRNGEIVGRYSPNTNPKELEDDIVKLLEQ

SEQ ID NO: 10448 - protein, 246 aa, Glycine max
MYKNKNKHTHPPQRYSHHFEELHNFVFLDMGSLALETEDVISDIYLSLGLKESDKGVGGPRVLSLLSSLLERSVQRNETLLEAKHVKDVVTVFHGLRAPTLSVRKYIDRIFKYSGCSPSCFVVAHIYVDRFIQHTEIKLTSLNVHRLLITSIMLAAKFIDDAFYNNAYYAKVGGVSTSELNRLEMSFLFGIDFRLQFSVDTFGRYCRQLEKEAAEVVQIERPMQACRIKESWSNKDDPTCASTIAR

SEQ ID NO: 10449 - protein, 468 aa, Triticum aestivum
SARAAGKRLWDAGVRDLLILEATGRVGGRMHKHNFGGLNVEIGANWVEGLNGDKVNPIWPMVNASLKLRNFYSDFDGVVGNVYKGGGGLRDEEFVQKRMDRGDAVEELGGKLAAEMDPSGRDDISILAMQRLFNHQPNGPATPVDMVLDYFRYDYEFAEPPRVTSLQGTEPTATFADFGDDANFVADQRGFETLIYHIAGQYLRSDKSGNIVDPRVKLNKVVREISYDQRGVVVTTEDNSAYSADYVIVSASIGVLQSDLIQFKPQLPAWKILAIYRFDMGVYTKIFLKFPRKFWPTGPGKQFFVYASSRRGYYGMWQSFEQEYPGANVLMVTVTDVESRRIEQQPDNVTMAEAVGVLRNMFPDRDVPDATDIYVPRWWSNRFFKGSYSNWPVGVNRYEYDQLRAPVGGRVYFTGEHTSEHYNGYVHGAYLAGLTPGTFMNRAPQGELQPPHLVLSSPGHAIELVCVI

SEQ ID NO: 10450 - protein, 275 aa, Picrophilus torridus DSM 9790
MRLIENWFSERYSDNLQLSFRVQDQLLSVKTDYQRIDLFNTYDFGKLLSIDGTVQLTEKDEYIYHEMITMVPYYCTAKSDSALIIGGGDGGAAKRLIDLGIKRIVNVEIDQNVVEISRKYFPELADSFNNKNVELIIGDGIKYVKDTDESFDLIIIDSTDPVGPAEGLFNKSFYENARARLSDDGIIVTQSGSPYYQPEALKMATKGMLDVFSNVRTYIAFIPTYPSGLWSFTMASKSEIMQRKDNIIPGRYFNEDVLKGSFYLPEFVKNIIKSI

SEQ ID NO: 10451 - protein, 131 aa, Prochlorococcus marinus str. MIT 9313
MSKKTDDILDSLKTLSLLEASELVKQIEDAFGVSAAASAGVVVAAGGAAGGGAAAEAAEEQTEFDVVLESFDASAKIKVLKAVREATGLGLGDAKAMVEAAPKTIKEGIAKNDAEALKKAIEEVGGKVSLK

SEQ ID NO: 10452 - protein, 437 aa, uncultured bacterium 561
MDRKTLEAHWMPYTGNRQFKKDPRIITSAEGVWYTDDKGRKVLDGHSGLWTSGLGHGRKEISAAVSQQINTLDFAPSFQFGHPPAFELADRIKGLMPEDLDYVFFTNSGSESADTSLKMARAYWRLMGQPTKTRFVGRMKGYHGVNFGGISVGGIAANRKFFGQGVEADHLRHTMLPQNRFCRGMPQDGAELADELNEMIALHDASTIAAVIVEPMAGSAGVIPPPVGYLQKLRDICDANDILLIFDEVITGFGRCGAMTGADAFGVVPDILNVAKQITNGAIPMGAVIARAGIYDTFMAHGGPDYALEFAHGYTYSAHPVACAAGLAALDVLTGEALPQRVADEAPFFEALLHDALSDKPHVSDVRNYGFAGAITLEPYPGEPLRRPFEVAMKMWEKGFLVRYGGDTIQLAPMFVMERPEMESLVGALADSLQELA

SEQ ID NO: 10453 - protein, 472 aa, Burkholderia cepacia R18194
MNLINGERVAGDGEAFPVVNPATGETVVTMRDASAEQVDAAVAAAAAAFPSWSATPPGARAARLLALADAIEERADEFAALESLNCGKPLHAVKADELPLTVDVFRFMAGAARCVSASSAGEYVAGFTSMIRRDAVGVVGSIAPWNYPLMMAAWKLAPALAAGCPVVLKPSELTPLTSLRVAELAAELFPRGVVNVVVGRGATTGDALINHRQLDLVSLTGGPATASRILEASSRKLMHTHMELGGKAPVIVFDDTNLDAAVEGIRNAAFFNAGQDCAQPCRLYVEDGIYDTFVANLANRVASIRLGAPDDTRTEMGPVISEGHRRRIAGFVDRARDLRHVEILTGGRDVAGGGYFYEPTIVAHARQDDEIVQREVFGPVISVTRFSGAEQAIHYANDSPYGLASSIWTRDVGKAMTVASRLRCGITWINAHGVATAEMPHGGMKASGYGSDMSVYALENYTTVRHVQIAHA

SEQ ID NO: 10454 - protein, 681 aa, Glycine max
MSGGGCSIVWFRRDLRVEDNPALAAGVRAGAVVCVFIWAPEEEGQYYPGRVSRWWLKQSLAHLDSYLRNLGSPLITKRSTNSISSLLEVVKSTGATQLFFNHLYDPLSLVRDHKAKEVLTAQGITVRSFNSDLLYEPWDVNDAHGQPFTTFSAFWERCLSMPYDPQAPLLPPKRIIPGDVSRCPSDTLVFEDELEKASNALLGRAWSPGWSNADKALTAFVNGALIEYSKNRRKADSATTSFLSPHLHFGEVSVKKVFHLVRIKQVFWANEGNKAGEESVNLFLKSIGLREYSRYISFNHPYSHERPLLGHLKFFPWVVNEGYFKAWRQGRTGYPLVDAGMRELWATGWLHDRIRVVVSSFFVKVLQLPWRWGMKYFWDTLLDADLESDALGWQYISGTLPDGREIDRIDNPQFEGYKCDPNGEYVRRWLPELARLPTEWIHHPWNAPESVLQAAGIELGSNYPLPIVGIDAAEVRLQEALIQMWQQEAASRAAMENGTEEGLGDSSESAPIAFPQDIQMEERPEPVRNNPPHGTRRYQDQMVPSITSSHVRVEEEETSSDLRNSAADSRAEVPINVTTQQNARETVNQGVLLNTNRNTRVQNNPTTWLRNAAEDSTAESSSSTRRERDGGVVPVWSPPASNFSEQFVDDENGIGTGSSYLQRQHPQSHQLMNWTRLPQTG

SEQ ID NO: 10455 - protein, 205 aa, Pyrobaculum aerophilum str. IM2
MARSGRYKVPFRRRREGLTNYRKRRKLLLSKKPRLVVRKTNKHIIAQIVVAKPQGDVTIVGADTRILAKFGWRGDENNVAAAYLLGLVVGYKARARRVEEAILDIGLHRPAPGARVFAVLKGALDAGLKIPHGEEVLPDEDRIKGKHVAEYAEKLKEENPEAYKARFSRYLQRGLEPEKLPEHFEEVKKKIVEYYEKKLAKVAAQ

SEQ ID NO: 10456 - protein, 406 aa, Burkholderia cepacia R18194
MGPDVIDIRKLYGQTGKFTYDPGFMSTAACNSAITYIDGDKGELLYRGYPIDNLAQNADFLESCYLLLKGELPNAAQKKEFVDTVTKHTMVHEQMHFFFRGFRRDAHPMAILVAAVGALSAFYHDSLDINDPRHREVSAIRMIAKLPTLVAMAYKYSIGQPFVYPKNSLSYSANFMHMMFSNPCEEYKVNDVLVRALDRILILHADHEQNASTSTVRLAGSSGANPFACIAAGIACLWGPAHGGANEAALNMLEQIGSPDNIPEFIKQVKDKNSGVKLMGFGHRVYKNYDPRAKLMRETCYEVLNELGLHDDPLFKLAMQLEKIALEDEYFVSRKLYPNVDFYSGIVQRALGIPTSMFTCIFAMARTVGWIAQWNEMIGDPEQKIGRPRQLFIGDTPREAKPLNAR

SEQ ID NO: 10457 - protein, 218 aa, Mesorhizobium loti MAFF303099
MKFFVDTADIKDIRELNDLGLLDGVTTNPSLILKSGGKIADVTKQICDIVQGPVSAEVVATEYKDMMAEAEVLAKIAPNVCIKVPLTLDGLKACKTIRTQMNRMVNVTLCFSANQALLAAKAGASFISPFVGRIDDTGSDGMELIQEIRQIYDNYDYQTEILTASVRTVNHVKQAALIGADVITAPPATLKALVNHPLTDKGLAAFLADWAKTGQKIG

SEQ ID NO: 10458 - protein, 196 aa, Physcomitrella patens
MSTSRFIKCVTVGDGAVGKTCMLISYTSNTFPTDYVPTVFDNFSANVVVDGNTVNLGLWDTAGQEDYNRLRPLSYRGADVFLLAFSLISKASYENISKKWIPELRHYAPSVPIILVGTKLDLRDDKQFFADHPGAAPITTSQGEELRKAIGAASYIECSSKTQQNVKAVFDAAIKVVLQPPKQKKKKKKQKNCVIL

SEQ ID NO: 10459 - protein, 137 aa, Glycine max
  misc_feature (77)..(77): Xaa can be any naturally occurring amino acid
  misc_feature (96)..(96): Xaa can be any naturally occurring amino acid
ARSMISFPAVTTVNRAGAGMVVPFTGLKPMAGSPTINTNNDITFIASRGGRVQCLHVCPPADKNNLETLSYLPDLDXAQSSKREEYLLTTGWLRCXGIRIKHGFVIREHTTLPGFYNGLLGTMWILPIDSCSHASNV

SEQ ID NO: 10460 - protein, 106 aa, Glycine max
  misc_feature (59)..(59): Xaa can be any naturally occurring amino acid
  misc_feature (62)..(62): Xaa can be any naturally occurring amino acid
AASQSGDSSLLPLLFRVEPMDIVGKAKEDASLPKATMTKIIKEMLPRGGRVDRDAQDLXTSXCVEVINLDWSEGNEVCRKEERRTIAPEHLLKASRALEFGEYIRE

SEQ ID NO: 10461 - protein, 300 aa, Geobacter bemidjiensis
RPFEALPKAAGSEYPTVESFWYFLLTGEVPTAAQVSAVEAEFKTRQVVPEYVYTAVRALPKESHPMVMLSVGIMAMQKDSKFAAFYSGGKFNKMDAWESVYEDASDIVARIPVLAAFIYNLKYRGDKQIAIDPKLDMGANFAHMIGQSEQYKDVARMYFILHSDHESGNVSAHTTHLVHSALSDPYYAYSAGLNGLAGPLHGLANQEVLGWIMEFQKKLNGAEPTKENVTKALWDTLNAGQVVPGYGHAVLRKTDPRYTAQREFCLKTPGLKDDQLFKLVAMIFETAPGVLTEHGKTKNP

SEQ ID NO: 10462 - protein, 279 aa, Pisum sativum
MSRREEEVRLITEPGFVDSTGQDKYNFPSIVCCRFTNKDIVAQIVSASIAGDIVLCAAYAHELPHYGLEVGLTNYAAAYCTGLLLARRVLKTLEMDEEYEGNVEASGEDYSVEPADSRRPFRALLDVGLVKTTTGNRVFGALKGALDGGLDIPHSDKRFAGFDKEKKELDAEVHRKYIFGGHVTAYMKTLIEDEPEKYQTHFSQYIKKGIEADGIEELYKKVHAAIRADPANKKAEKQPPKEHKRYNLKKLTYDERRTKLIARLEALNSAVDEDEDDDE

SEQ ID NO: 10463 - protein, 487 aa, Burkholderia cepacia R18194
MHIKQLYIDGAWQPAAAGGQRAIIDPATGEAIARVAYGSAADAGHAIRAARAAFDAGEWPHLPAEERAACLRRLANALRDEAPALARIETANTGKTLAESSSDVHDAASAFDYFASLAVTETGSMNAAKPHVISVTLREPVGVCGLITPWNYPLLQAAWKLAPALVAGNTVVVKPASLTPLSTHRLVELAHDAGLPRGVLNLVTGGADVGDALAASPQVDLISLTGSNAAGASVMRAAAGNFKRVSLELGGKNPNLVFADADVDTALDYALNAAFFNAGQMCSAGSRLLVERTLHDAFVDALAARIAAIRVGRGDDDATRMGPVISAQQRDRVLALIGEAARDGARIVCGGRAPAGDAFATGFWVEPTLIAGVRTTMAIAREEVFGPVLTVEAFDSEDEAVALANDTPFGLAGAVWTRDFARANRVMRRLRAATVWINDYNVTLPGAPWGGYKASGIGRELSRSGLDEYTELKHAYLNFEASPQRWF

SEQ ID NO: 10464 - protein, 299 aa, Desulfuromonas acetexigens
KAKGSKYPTVESFWYFLLTGDVPTQAQVDAVVAEWKTRQIVPSYVWDAIRALPRDSHPMVMLSVGILALQKDSKFAAFYNSGKFNKMTAWESVYEDASDLCARIPIIAAFIYNLKYRSDFQTAIDPNLDMGANFAHMIGQCEEYKDVARMYFILHSDHESGNVSAHTTHLVHSALSDPYYAYSAGLNGLAGPLHGLANQEVLDWTLKFQEKYCKDVEPTKELVTKALWDTLNAGQVVPGYGHAVLRKTDPRYMSQREFCLNTPGLKDDKLFKLVAMIFETAPGVLTEHGKAKNPWPNVD

SEQ ID NO: 10465 - protein, 322 aa, Oryza sativa (japonica cultivar-group)
MSVIDILTRVDAICQKYGRYDAEKLHGSGVAGEDPFARLYASVDADLNECLEKAEAAKQEKNRATVVALNAEIRGTKAKLLEEDLPKLQRLALKKVKGLSKEELAIRGDLVTALPDRIQSIPDGSATSSKKTGLWGSSGSRAGTGIKFDSTYDLEWKLIYVGSAEDENYDQLLESVLVGPVNVGTYRFVLQRPVLILHWTCCIFAAILDADPPDPSKIRKEDIIGVIVLLLTCSYMGQEFIRVGYYVNNDNDDEQLREEPPAKLLIDRVQRNILADKPSVTKFPINFHPETSAGAGQEQQQQQQSGSPENHPNQGSKPNPDQ

SEQ ID NO: 10466 - protein, 159 aa, Glycine max
MDFRVMGLESPLFHTLQHMMDMSEDGAGDNKTHNAPTWSYVRDAKAMAATPADVKEYPNSYVFEIDMPGLKSGDIKVQVEDDNVLLICGERKRDEEKEGVKYLRMERRVGKFMRKFVLPENANTDAISAVCQDGVLSVTVQKLPPPEPKKPRTIEVKVF

SEQ ID NO: 10467 - protein, 292 aa, Malonomonas rubra
GFWYLLLTGDVPTMEQTLEVVEDWNQRSAVPEYVIDVLRALPRDSHPMAMFSAAIVAMQRESVFASNYAAGKFNKMTCWEDMYEDANTLMARLGPIGAYIYRMKYKGDTHIAPDPELDMGGQFAHMIGQSDEYKDVARMYFILHSDHESGNVSAHTTHLVASALSDAYYAYSAGINGLAGPLHGLANEEVLRWTQNFMQKLGGEVPTEEGLKEALWATLNSGQVIPGYGHAVLRKTDPRYTSQREFCMNTSGLKEYPLFQLVKMIFEVAPGVLTEKNPWPNVDAQSGVIQWY

SEQ ID NO: 10468 - protein, 174 aa, Triticum aestivum
MAPAVMASSATTVAPFQGLKSTAGLPVSRRSRGSLGSVSNGGRIRCMQVWPIEGIKKFETLSYLPPLSTEALSKQVDYLIRSKWVPCLEFSKVGFVFREHNSSPGYYDGRYWTMWKLPMFGCTDATQVLNEVEEVKKEYPDAYVRVIGFDNLRQVQCVSFIAFRPPGCEESGKA

SEQ ID NO: 10469 - protein, 243 aa, Zea mays
MFGYRKAGPDLEAGGSSLLYPGMTESPELRWAFVRKIYVILAVQLAMTAAVSAFVVKVPAVSNFFVSSNAGVALYIFLIILPFLVLCPLRYYHQKHPVNLLLLGLFTVAISFAVGMTCAFTSGKIILEAAILTAVVVISLTAYTFWAAKRGHDFNFLGPFLFAAIMVLMVFSLIQIFFPLGKISVMIYGGLASLIFCGYIIYDTDNVIKRYTYDEYIWAAVSLYLDVINLFLSLLQLLRAADS

SEQ ID NO: 10470 - protein, 464 aa, Arabidopsis thaliana
MENKPSVLTDKYDVGRLLGQGTFAKVYYGRSILTNQSVAIKMIDKEKVMKVGLIEQIKREISVMRIARHPNVVELYEVMATKTRIYFVMEYCKGGELFNKVAKGKLRDDVAWKYFYQLINAVDFCHSREVYHRDIKPENLLLDDNENLKVSDFGLSALADCKRQDGLLHTTCGTPAYVAPEVINRKGYDGTKADIWSCGVVLFVLLAGYLPFHDSNLMEMYRKIGKADFKAPSWFAPEVRRLLCKMLDPNPETRITIARIRESSWFRKGLHMKQKKMEKRVKEINSVEAGTAGTNENGAGPSENGADEPTNLNAFDLIALSAGFDLAGLFGDDNKRESRFTSQKPASVIISKLEEVAQRLKLSIRKREAGLFKLERLKEGRKGILSMDAEIFQVTPNFHLVEVKKSNGDTLEYQKLVAEDLRPALSDIVWVWQGEKDELTSQQETEYQQQQQQEQQEQEEPLKF

SEQ ID NO: 10471 - protein, 489 aa, Pirellula sp. 1
MSTTLPEIAPPKVRHTQLFIDGQWRDSASGKTFATINPATEEEIVQVAEGDKEDIDAAVKAARKAFESGPWRTMDARDRGRLMMKLADAIENEIDELAQLETLDNGKPLRESRHADLPLVIDALRYYAGYADKIQGETVPIRGNYLCYTRKEPVGVVGQIIPWNFPMLMVAWKWGPALATGCTIVMKPAEQTPLTCLRMAQLAKEVGFPDGVINVVPGFGPTAGGALVDHPGVDKIAFTGEHRTAQLIMKNSAQSLKRLTFELGGKSPNVIFSDADLDAAVQGSFVGLYLNQGQCCCAGSRVFVEESIHEAFVEKLTDLTNKRVVGNPFEHTTEQGPQIDQAQFDKIMSYIDKGNQQGASCVSGGKRSGDRGYFIEPTVFTDVQDDMAIARDEIFGPVMSVLSFKDSDDILKRANDTMFGLAAAVWTQDIKKAHHFAANVRAGTVWVNCYDVFDAAAPFGGFKMSGQGRELGTEGLKAYLESKTVTVAL

SEQ ID NO: 10472 - protein, 298 aa, Triticum aestivum
  misc_feature (102)..(102): Xaa can be any naturally occurring amino acid
MEAVARASIAAGSHARVPLCRRPRPRHAVRCLRGRPSVACAAAADADVVRLFDAAKLTVDEFVKSGMVVGLGSGAASGLAVQYLGTRLRRGSLTGIVGIPSXSVICASEAEKAGIKVGSHEEGAQIDFAFADADVIEEGTLAAVIGRGKTESGQPSFIQEKGIVESADKVAFIIDNDKYVNGIEGSIPVLVKSGNWIDTAEEIDDLFLGDAEVWRRPSIGTAGPSGGDFPLVTKEGHHILDVIFTTPIQDLGKVAEGLEKIVGVVDHGIICNTMPYAVIASKGEVQVLDRKSSVIPNT

SEQ ID NO: 10473 - protein, 193 aa, Lactococcus garvieae
MKRIAVLTSGGDAPGMNAAIRAVVRKAISEGIEVYGINHGYAGMVAGDIFPLTSASVGDKVGRGGTFLYSARFPEFAQLEGQLAGIEQLKKHGIEGVVVIGGDGSYHGAMRLTEHGFPAVGLPGTIDNDIVGTDFTIGFDTAVSTVVDAIDKIRDTSSSHHRTFVVEVMGRNAGDIALWSGIAAGADDIAIPE

SEQ ID NO: 10474 - protein, 128 aa, Synechococcus elongatus PCC 6301
MSAKTDEILESLKTLTLLEAAELVKQIEEAFGVSAAAPVGGVVVAAAAGAAAEAVEEKTEFDVVLEEVPADKKIAVLKVVRGITGLGLKEAKDLVEAAPKPIKEGVSKDDAEAAKKELEEAGAKVSVK

SEQ ID NO: 10475 - protein, 286 aa, Synechococcus elongatus PCC 6301
MSADAPVWIDEVFEDRVRYGLRGQILWEETSPFQKITIVDTEHYGRGLLLDDCWMTAERCEVCYHEYLVHPPLTTAASIARVLVIGGGDGGTVREVLRYAEVEQVDLVEIDGRVVELSQEYLGAIGTAWADPRLNVKIGDGIAFVQTAPDASYDVILVDGSDPAGPAAGLFNREFYENCRRVLKPGGVFASQAESPDSFLAVHLEMIETLSAVFAEAKPYYGWVPMYPSGWWSWLYASDTPGQFQKPQSDRLAAIEPQVEIYNRDIHQAAFAQPNFVRRGLSARQG

SEQ ID NO: 10476 - protein, 432 aa, Oryza sativa (japonica cultivar-group)
MLISEYNWNATYKFDMFSTHEHEALQKREPIKAHLLSQPTRYVILVAHAMSAISRPSIILGAHTVTTNGSSARTHEAERNSTVERSTHVLKAASSPKSPKSPIRISPPRRRCGRSSPPLSLLFPHGDRHRVALRGGEVMWLGFVCSIRHVEGFMASPHSQEVKRWVLSDFDIGKPLGRGKFGHVYLAREKRSNHIVALKVLFKSQLKQSQVEHQLRREVEIQSHLRHPNILRLYGYFYDTRVYLILEYALKGELYKELQRCKHFSERRSATYIASLAHALIYLHGKHVIHRDIKPENLLIGSQGELKIADFGWSVHTFNRRRTMCGTLDYLPPEMVEKTEHDYHVDIWSLGILCYEFLYGVPPFEAKEHSETYRRIVKVDLKFPLKPFVSPAAKDLISQMLVKNSAHRLPLHKLLEHPWIVQNADPSGVYRG

SEQ ID NO: 10477 - protein, 342 aa, Glycine max
MAAENVVEFTDLPVKRPREEEEEEEEQTNGVSNDAVSTLPNDPQYPGISAVIPGWFSEISPMWPGEAHSLKVEKILFQGKSDYQNVMVFQSSTYGKVLVLDGVIQLTERDECAYQEMITHLPLCSISNPKKVLVIGGGDGGVLREVARHASVEKIDICEIDKMVVDVSKQFFPDIAVGFEDPRVTLTVGDGVAFLKNVPEGTYDAVIVDSSDPIGPAQELFEKPFFASVAKALRPGGVVCTQAESIWLHMHIIEDIVANCRQIFKGSINYAWTTVPTYPSGMIGFMLCSTEGPLVDFKHPVNPINENDSQQSRPLKFYNSEIHTAAFCLPSFAKRKIGSKTN

SEQ ID NO: 10478 - protein, 375 aa, Kineococcus radiotolerans SRS30216
MSDYYDVLGVSRDASAEDIKRAYRKLARKLHPDVTSDPDAGEKFKEVSQAYETLSTPDKRAAYDRGGSMPGGAAGGFGAGFGFSDIMDAFFGQGGGGRPGAPASRTQRGQDALIRVDVDLAEAAFGGERSIQVDTAVLCTTCQGSCCQPGTSPATCDICHGQGSVQRVVRSLLGQVMTTAPCPTCHGYGTVLPSPCLECNGEGRTRARRPLTIRIPAGVDTGTRIQLASQGEVGTAGGPPGDLYVEIHERPHPVFSRNGDDLLCTLHVPMTAAALGASIPLETLDGSAEEVDVRPGTQGGEVITLKQKGAEHLRAQGRGDLLVTLEVTTPRDLDDEQEELLRRLAELRGEVRPAGKLAPAHQGVFSKLRGKFSGR

SEQ ID NO: 10479 - protein, 287 aa, Glycine max
FGSRQDGIDAIEDVIYHIETYDVTTIRASIPMFLMSRKIKSLGVKMVISGEGSDEIFGGYLYFHKAPNKEEFHQETCRKIKALHKYDCLRANKSTFAWGLEARVPFLDKEFIRVAMNIDPECKMIKKEEGRIEKWALRRAFDDEEHPYLPKHILYRQKEQFSDGVGYGWIDGLKAHAEKHVTDRMMLNAANIFPFNTPTTKEAYHYRMIFERFFPQNSARLTVPGGPSVACSTAKAVEWDAAWSNNLDPSGRAALGVHASAYGNQVKAVEPEKIIPKMEVSPLGVAI

SEQ ID NO: 10480 - protein, 288 aa, Prochlorococcus marinus subsp. pastoris str. CCMP1986
MEIPKIQWYPGHIAKAEKKLTEVINRVDLVIEVRDARIPLSTGHPHLNQWIRNKKHILVINRADMISTETITNWNKWFKKDNIYPLWCDAKNGKGIKEICKSAKESRLSIDNKRLSRGMKVRPIRALTLGFPNVGKSALINRIAKKKVVESARKAGVTRNLRWIRLDNGIDLLDAPGVIPPNLENQKSALNLALCDDIGEAAYEIESVAIEFIKIIFKLKEDKNANISLSKISDRYGVDILKNFDNPHEWIDLVALKHTSGDKRRMAHKLLEDYRNQMLGKISLEVPR

SEQ ID NO: 10481 - protein, 181 aa, Zea mays
MASSMLSSAAVVTSPAQATMVAPFTGLKSSAAFPVTRKANNDITSIASNGGRVSCMKVWPPVGKKKFETLSYLPDLTEVELGKEVDYLLRNKWIPCVEFELEHGFVYREHGSTPGYYDGRYWTMWKLPLFGCTDSAQVLKEVQECKTEYPNAFIRIIGFDNNRQVQCISFIAYKPPSFTGA

SEQ ID NO: 10482 - protein, 528 aa, Glycine max
MAEVAAPKKENPNLLLGRFELGKLLGHGTFAKVHHARNIKTGEGVAIKIINKEKILKGGLVSHIKREISILRRVRHPNIVQLFEVMATKTKIYFVMEFVRGGELFNKVAKGRLKEEVARKYFQQLVSAVEFCHARGVFHRDLKPENLLLDEDGNLKVSDFGLSAVSDQIRHDGLFHTFCGTPAYVAPEVLARKGYDGAKVDIWSCGVVLFVLMAGYLPFHDRNVMAMYKKIYKGEFRCPRWFSSELTRLFSRLLDTNPQTRISIPEIMENRWFKKGFKQIKFYVEDDRVCSFDEKQLQHHDGDDYLATSDSEVEIRRKNSNCNSTSNGNSLPRPASLNAFDIISFSQGFDLSGLFEEKGDEARFVSSAPVSKIISKLEEVAQLVSFTVRKKDCRVSLEGCREGVKGPLTIAAEIFELTPSLVVVEVKKKGGDKAEYEKFCNSELKPALENLGMEDSASSSSSCHQSTHTQSEFQQQHRTFSDSALNRHSDNNECLYDQELGLAEETSIPQLGEPKFEFQQENVPMFTI

SEQ ID NO: 10483 - protein, 376 aa, Thermotoga maritima MSB8
MDALEIHRFLKGKIRTALPVEKVDRETLSLLYTPGVADVARACAEDPEKTYVYTSRWNTVAVVSDGSAVLGLGNIGPYGALPVMEGKAFLFKAFADIDAFPICLSESEEEKIISIVKSLEPSFGGINLEDIGAPKCFRILQRLSEEMNIPVFHDDQQGTAVVVSAAFLNALKLTEKKIEEVKVVVNGIGAAGYNIVKFLLDLGVKNVVAVDRKGILNENDPETCLNEYHLEIARITNPERLSGDLETALEGADFFIGVSRGNILKPEWIKKMSRKPVIFALANPVPEIDPELAREAGAFIVATGRSDHPNQVNNLLAFPGIMKGAVEKRSKITKNMLLSAVEAIARSCEPEPERIIPEAFDMKVHLNVYTAVKGSA

SEQ ID NO: 10484 - protein, 445 aa, Oryza sativa (japonica cultivar-group)
MYKAKRTAAQKVRRCLGKYELGRAIGQGTFAKVRFAKNMETGDHVAIKILDKAKVQKHRLVEQIRREICTMKLIQHPNVVHLHEVMGSKTRIFIVLEYVMGGELHDIIATSGRLKEDEARKYFQQLINAVDYCHSRGVYHRDLKLENLLLDTAGNIKVSDFGLSAISEQVKADGLLHTTCGTPNYVAPEVIEDKGYDGALADLWSCGVILFVLLAGYLPFEDENIVSLYNKISGAQFTCPSWFSAEAKRLIARILDPNPATRITTSQVLQDQWFKKGYESPVFDDKYYPYFHDVYDAFGDSEEKHVKEAMEEQPTLMNAFELISLNKGLNLDNFFESDKKYKRETRFTSQCPPKEIINRIEEAANLLGFNIQKRNYRMRMENIKEGRKGHLNIATEVFQVAPSLHVVELKKAKGDTLEFQKFYQTLSTQLKDVVWELEDAAEDMS

SEQ ID NO: 10485 - protein, 224 aa, Glycine max
  misc_feature (208)..(208): Xaa can be any naturally occurring amino acid
MEDGAGRGLECQKTMDGKVSNSNGPEKEIPSCCLKAKASIPESEAKFHSTVVSGWFSASQTCSGKSGKAVYFNNPMWPGEAHSIKVEKILYKEKSEYQEVLVFESSTYGKVLVLDGIVQLTEKDECAYQEMIAHLPLCSIHSPKNVLVVGGGDGGVLREVARHSSVEHIDICEIDKMVIDVSRKFFPQLAVGFEDSRVHLHVGDAVDXLKSAPEGEYDAIIVDS

SEQ ID NO: 10486 - protein, 114 aa, Solanum tuberosum
MEMFGKIACFVLLCMVVVAPHAEALSCGQVTSGLAPCLPYLQGRGPIGGCCGGIKGLLGAAKTPADRKTACTCLKSAASAIKGINVGKAAGIPRVCGVNIPYKISPSTDCSKVR

SEQ ID NO: 10487 - protein, 114 aa, Solanum tuberosum
MEMFGKIACFVLLCMVVVAPHAEALSCGQVTSGLAPCLPYLQGRGPIGGCCGGIKGLLGAAKTPADRKTACTCLKSAASAIKGINVGKAAGIPRLCGVNIPYKISPSTDCSKVR

SEQ ID NO: 10488 - protein, 128 aa, Archaeoglobus fulgidus DSM 4304
MKQQVEVRQLREGGYVVIDDEPCEILSISVSKPGKHGAAKARIDAIGIFDSQKRSIVQPVTAKIYVPIVERKRAQIISVTGNVAQLMDLETYETFELEVPEELKDKMEQGREVIYLESLGKRKIERMA

SEQ ID NO: 10489 - protein, 412 aa, Archaeoglobus fulgidus DSM 4304
MQYEKVKPPENGEKIRYENGKLIVPDNPIIPYFEGDGIGKDVVPAAIRVLDAAADKIGKEVVWFQVYAGEDAYKLYGNYLPDDTLNAIKEFRVALKGPLTTPVGGGYRSLNVTIRQVLDLYANVRPVYYLKGVPSPIKHPEKVNFVIFRENTEDVYAGIEWPRGSEEALKLIRFLKNEFGVTIREDSGIGIKPISEFATKRLVRMAIRYAIENNRKSVTLVHKGNIMKYTEGAFRDWGYEVAKQEFGEYCITEDELWDKYGGKQPEGKIVVKDRIADNMFQQILTRTDEYDVIALPNLNGDYLSDAAAALIGGLGIAPGSNIGDGIGVFEPVHGSAPKYAGQNKVNPTAEILTGALMFEYIGWKDASEMIKKAVEMTISSGIVTYDIHRHMGGTKVGTREFAEAVVENLQSL

SEQ ID NO: 10490 - protein, 493 aa, Zea mays
MASPFSVPSLIMEEEGRFEAEVAEVESWWGTERFRLTKRPYTARDVVLLRGTLRQSYASGEMAKKLWRTLKARMSLPRAERARAPYVDFLKPIIADGDTGFGGATATVKLCKLFVERGAAGVHLEDQSSVTKKCGHMAGKVLVAVSEHVNRLVAARLQFDVMGVETVLVARTDAVAATLIQTNVDARDHQFIVGATNPGLRGQSLAAVLSAGMSAGKSGRELQAIEDEWLAAARLKTFSECVRDAIAGLGVAGQEKQRRLQEWDRATGGYDRCVSNDQARDIAASLGVTSVFWDWDLPRTREGFYRFRGSVAAAVVRGRAFAPHADVLWMETSSPNVAECTAFAEGVKAACPEAMLAYNLSPSFNWDASGMTDAEMAAFIPSVARLGYVWQFITLAGFHADALVTDTFARDFARRGMLAYVERIQREERINGVETLEHQKWSGANFYDRVLKAVQGGISSTAAMGKGVTEEQFKDPRPATGSSGLQVMAKSRI

SEQ ID NO: 10491 - protein, 175 aa, Oryza sativa
MAPTVMASSATSVAPFQGLKSTAGLPVSRRSTNSGFGNVSNGGRIKFMQVWPIEGIKKFETLSYLPPLTVEDLLKQIEYLLRSKWVPCLEFSKVGFVYRENHRSPGYYDGRYWTMWKLPMFGCTDATQVLKELEEAKKAYPDAFIRIIGFDNVRQVQLISFIAYKPPGCEESGGN

SEQ ID NO: 10492 - protein, 326 aa, Arabidopsis thaliana
MDRISGLPDEVLVKILSFVPTKVAVSTSILSKRWEFLWMWLTKLKFGSKRYSESEFKRLQCFLDRNLPLHRAPVIESFRLVLSDSHFKPEDIRMWVVVAVSRYIRELKIYSSHYGEKQNILPSSLYTCKSLVILKLDGGVLLDVPRMVCLPSLKTLELKGVRYFKQGSLQRLLCNCPVLEDLVVNLSHHDNMGKLTVIVPSLQRLSLSTPSSREFVIDTPSLLSFQLVDRNDNSHTFLIENMPKLREAYINVPFADIKSLIGSITSVKRLAISSEVGYGEGFIFNHLEELTLWNKYSSNLLVWFLKNSPNLRELMLVSETDVSFFH

SEQ ID NO: 10493 - protein, 175 aa, Triticum aestivum
MAPAVMASSATTVAPFQGLKSTAGLPISCRSGSTGLSSVSNGGRIRCMQVWPIEGIKKFETLSYLPPLSTEALLKQVDYLIRSKWVPCLEFSKVGFVFREHNSSPGYYDGRYWTMWKLPMFGCTDATQVLNEVEEVKKEYPDAYVRVIGFDNMRQVQCVSFIAFRPPGCEESGKA

SEQ ID NO: 10494 - protein, 263 aa, Magnetospirillum magnetotacticum MS-1
MGRGRDFRGPQKRGFDDGGAEPRWPDELPPGGGDRFGGGGNRFGGGGGGGFDRGPARAPVAPSGPERDATVKWFNKEKGFGFVELGDGSGDAFLHIRAVEAAGHDDLLPGTRLTVQTAQGQKGPQVTSVTSVDTSTAEAAPPRREAGPRFGGGDRFGGGDRFGGGDRFGGGGDRFGGGGRDRFGGGGRVASGPSVEMTGTVKWYDPAKGFGFVSVNDGGKDVFVHRSALSRAGLDSLAEGQQVTLNVVDGQKGREAQSINVDY

SEQ ID NO: 10495 - protein, 342 aa, Pirellula sp. 1
MKALQLSAPKQWEQIEIDEPSPPGPGEALVRIHRVGVCGTDLGGYLGKFPFFSYPRIPGHELGVEVVAVGEGVENVKVGDRCSVEPYINCQKCYSCERGLTNCCESHQTLGVMCDGGLTEKMILPARKLHPANNLSYEQSALVETLAIGCHAIDRAHVTEKDTVLVIGSGPIGLSAIEFARVAGARVIVADLSQTRLDFVTEKMGMTDTIQFDGSEADIEKLEAMTDGRRADVVVDATGNHHSMRRAMEMAAFGGRVVYVGITQQDLQFPHAPFLHRRELTILASRNALTGDFARIIQLIESGVIDTDPWITHHAKFEEVIESFPAWTDPESGVVKAVIHIS

SEQ ID NO: 10496 - protein, 470 aa, Pirellula sp. 1
MVGLFSLSSLMARTLIRNAQAVLPGDGIHSSSGTVDLRHVLIEDGKILDADASSTASCDHLIEADDLFLLPGVIDDQVHFREPGLTHKEDLATASHACAAGGVTTFLEMPNTKPPAITIEGVQAKEALAAEKSLVNYGFYIGATPDNVAELNAAQNVPGIKIFIGSSTGNLLVDEQAALERIFAETTLPICAHCEDETTVRANAERLAGTTDIHDHSRIRDEAAAVISTARATELARRHQHRFHVLHVSTGAELVSLVDPSPYLTAEVCPHHLFFNVDDYDRLGSLIQMNPSIKTAEDNAKLWQALQDDVIQVIATDHAPHTLEEKAQPYPQSPSGLPAVENSLALMLNQCNAGKVTLPQIAHWMSDAPARVWGITGKGRIANGYDADLVLVRMNSERTIRDEDQHTKNRWSPWNGETLRGWPVTTIVNGSIVWSIDGGFREKIRGQKPIFDHARGGFWNTADGIGPTNA

SEQ ID NO: 10497 - protein, 197 aa, Glycine max
MSASRFIKCVTVGDGAVGKTCLLISYTSNTFPTDYVPTVFDNFSANVVVNGSIVNLGLWDTAGQEDYNRLRPLSYRGADVFILAFSLISKASYENVSKKWIPELKHYAPGVPIILVGTKLDLRDDKQFCIDHPGAVPITTAQGEELRKLINAPAYIECSSKTQENVKAVFDAAIRVVLQPPKQKKKKGKAQKACSIL

SEQ ID NO: 10498 - protein, 146 aa, Triticum aestivum
MASSMLSSAAVATSPAQATMVAPFTGLKSSAAFPVTRKSNTDITSIASNGGRVSCMKVWPPVGKKKFETLSYLPDLTDVELAKEVDYLLRNKWIPCVEFELEHGFVYREHGSTPGYYDGRYWTMWKLPLFGCTDSAQVLKEVQECK

SEQ ID NO: 10499 - protein, 422 aa, Staphylococcus epidermidis ATCC 12228
MSAEKITQSKDGLNVPNEPIIPFIIGDGIGPDIWKAASRVIDAAVEKAYNGEKRIEWKEVLAGQKAYDETGEWLPQETLETIKEYLIAVKGPLTTPIGGGIRSLNVALRQELDLFTCLRPVRWFKGVPSPVKRPEDVDMVIFRENTEDIYAGIEFKQGTSEVKKVIDFLQNEMGATNIRFPETSGIGIKPVSKEGTERLVRAAIQYALDNNRKSVTLVHKGNIMKFTEGSFKQWGYDLAHNEFGDKVFTWQQYDEIVEQKGKDAANEAQSKAEQEGKIIIKDSIADIFLQQILTRPAEHDVVATMNLNGDYISDALAAQVGGIGIAPGANINYETGHAIFEATHGTAPKYAGLNKVNPSSEILSSVLMLEHLGWQEAADKITDSIEATIASKIVTYDFARLMDGAKEVSTSDFADELIKNIR

SEQ ID NO: 10500 - protein, 373 aa, Staphylococcus epidermidis ATCC 12228
MAELKRGLEGVIAAETKISSIIDSQLTYAGYDIDDLAENAQFEEIIFLLWNYRLPNENELSELKEKLFDYMTLNNRVYKHFEEYVTDHVHPMTALRTSVSYVAHFDPEAENESDENKYDRAIRIQAKIASLVTAFARVRDGKEPVKPNSELSYAANFLYMLRGELPTEVEVEAFNKALILHADHELNASAFTARCAVSSLSDMYSGVVAAIGSLKGPLHGGANERVMSMLKEIGSIDNVDHYLDERFANKDKIMGFGHRVYKDGDPRAKYLREMSRKITEETGQSELFEMSLAIEKRMKEEKGLIPNVDFFSATVFHSMNIPHDLFTPIFAVSRTSGWIAHILEQYRDNRIMRPRAKYIGEQNRKYVPIEERP

SEQ ID NO: 10501 - protein, 464 aa, Zea mays
  misc_feature (235)..(235): Xaa can be any naturally occurring amino acid
  misc_feature (326)..(326): Xaa can be any naturally occurring amino acid
MKPPSLVHCFKLLVLLALARLTMHVPDEDMLSPLGALRLDGHFSFHDVSAMARDFGNQCSFLPAAVLHPGSVSDIAATVRHVFSLGEGSPLTVAARGHGHSLMGQSQAAQGIVVRMESLRGARLQVHDGFVDAPGGELWINVLRETLKHGLAPKSWTDYLHLTVGGTLSNAGVSGQAFRHGPQVSNVNQLEIVTGRGDVVTCSPDDNADLFYAALGGLGQFGIITRARIALEPAXDFESFTEDQEMLIMAENSFDYVEGFVIINRTGVLNNWRASFKPQDPVEASHFQSDGRVLYCLELTKNFNSDDTDTMEQEVTVLLSRLRFIXLEFLDRVHTSELKLRAQGLWEVPHPWLNLLIPRSSIRRFAKEVFGKILVGFLSSAPSLSGYGSIAHSMNLNKQIVEFCEEAGIGMKQYLAPYTTQQQWKAHFGARWETFERRKHRYDPLAILAPGQRIFPKASLPLPL

SEQ ID NO: 10502 - protein, 478 aa, Ralstonia solanacearum
MQQRDTLFINGQWVAPQGKGTIDVIHSTTEAVMGTIPEGSAADAEAAVAAARAAFDGWAATPAPKRAEIIQKIADGLKARSEALAQLIAGEVGMPIKLARAIQVGSPVFNWGHFARLLGAFPFEARVGNSLVVREPVGVVGAITPWNYPLHQITLKVAPALAAGCTVVLKPSEVAPLNAFVLAEVIEAAGLPPGVFNLVTGYGPVVGEVLASHPEVDMVSFTGSTRAGKRVAELASQTVKRVALELGGKSASVVLDDADLAAAVKGTLSACFLNSGQTCSAHTRLLVPRARYEEVKALAKQFAATYVPGDPAQETTRLGPLISAVQRDRVLGYIRKGLEEGAELIAGGPEKPEGVSTGYFVRPTVLGNVKPSDTVAREEIFGPVLTILCYDDEEEAIRIANDSIYGLAGGVWSGDEARAMRVARRIRTGQVDINGGPFNMLAPFGGYKQSGNGREQGQYGLEEFLEYKALQLKPAQAT

SEQ ID NO: 10503 - protein, 296 aa, Prochlorococcus marinus str. MIT 9313
MSGAGSAVSTPTIQWYPGHIAKAEQQLSKNLDKIDLVIEVRDARIPIATAHPQLQRWIKGKQHLLVINRRDMISSAARQSWDRWFRDQAQTPWWCDAKAGTGVKQVQQAAIRAGDQLNQRRRSRGMRPRPVRALTLGFPNVGKSALINRLVRQKVVESARRAGVTRTLRWVRLGQDLDLLDAPGVLPPRLDDQQAALHLALCDDIGQAAYDVELVALALLETLTVLEKQAAAGVVAGILKQRYGINLAGDQADAHAWLMTVAERHTSGDTERMAQRLLDDFRRALLGPIALELPLP

SEQ ID NO: 10504 - protein, 160 aa, Oryza sativa (japonica cultivar-group)
MSDSEEHHFESKADAGASKTYPQQAGTIRKNGYIVIKNRPCKVVEVSTSKTGKHGHAKCHFVAIDIFNGKKLEDIVPSSHNCDVPHVNRTEYQLIDISEDGFVSLLTESGNTKDDLRLPTDDSLLGQIKTGFGEGKDLVVTVMSAMGEEQICALKDIGPK

SEQ ID NO: 10505 - protein, 194 aa, Aspergillus nidulans FGSC A4
MASATTFYDFEPVDKKGEAYPLNQLKGKVILVVNTASKCGFTPQFKGLETLYQSIKAKRPDDFVILGFPCNQFGGQDPGSNDQIQEFCQLNYGVTFPVLGKTEVNGDNANPLWTWLKESQPGLLGLKRIKWNFEKFLISADGKVVGRWASTTKPEGLESRILEEIEKAEKQGLLASKAMQPEAAGTDGETAKLA

SEQ ID NO: 10506 - protein, 369 aa, Crocosphaera watsonii WH 8501
MENIPNHLSKIDGQLGKLIILGFPFEELAVNASFEEMIYLFLHNHLPNKNELDNVTKKLLSHRYLDEKILDILKSAASNKIELIEGVRIGVSCLTMDMESNRIDKEGINGALKIISSVPIITAAYWRLLQDQPIIQPHLELSHGANYLYMLTGENPSPENVKTLEIYLNTVIEHGMNASTFAARVVMSTRSDFVSAVTAAIGAMKGVLHGGAPGPVLDMLLDMQESGDIEGYLRHKFENRELLMGFGHRVYRVKDPRAILLSQVSADVWKRREDKEFWAFAVDVESTALRLLREYKPNRRIETNVEYYTALVLHGLGLPPALFTSTFTVSRVVGWLAHCLEQLELDRIIRPSSVYTGPTEQKWCPMEER

SEQ ID NO: 10507 - protein, 158 aa, Streptococcus pneumoniae R6
MTSLYDFSVLNQNNQATPLDSYRGKVLLIVNTATGCGLTPQYQGLQELYERYQDQGFEILDFPCNQFMGQAPGSAEEINTFCSLHFQTTFPRFAKIKVNGKEADPLYVWLKDHKSGPLGKRIEWNFAKFLIGRDGQVFERFSSKTDPKQIEEAIQTLL

SEQ ID NO: 10508 - protein, 489 aa, Escherichia coli CFT073
MHLLTLSINPTFLMRSNHFKEFKMDKKQVTDLRSELLDSRFGAKSISTIAESKRFPLHEMRDDVAFQIINDELYLDGNARQNLATFCQTWDDDNVHKLMDLSINKNWIDKEEYPQSAAIDLRCVNMVADLWHAPAPKNGQAVGTNTIGSSEACMLGGMAMKWRWRKRMEAAGKPTNKPNLVCGPVQICWHKFARYWDVELREIPMRPGQLFMDPKRMIEACDENTIGVVPTFGVTYTGNYEFPQPLHDALDKFQADTGIDIDMHIDAASGGFLAPFVAPDIVWDFRLPRVKSISASGHKFGLAPLGCGWVIWRDEEALPQELVFNVDYLGGQIGTFAINFSRPAGQVIAQYYEFLRLGREGYTKVQNASYQVAAYLADEIAKLGPYEFICTGRPDEGIPAVCFKLKDGEDPGYTLYDLSERLRLRGWQVPAFTLGGEATDIVVMRIMCRRGFEMDFAELLLEDYKASLKYLSDHPKLQGIAQQNSFKHT

SEQ ID NO: 10509 - protein, 143 aa, Glycine max
MAMAFKMATTGMWVTDECKNSFMDMKWKKEHRYIVFKIDEGSRLVTVDKLGGPTEGYDDLTASLPTDDCRYAVFDFDFVTVDNCRKSKIFFIAWSPTASRIRAKILYATSKDGLRRALDGISYELQATDPTEMGFDVIRDIAK

SEQ ID NO: 10510 - protein, 96 aa, Triticum aestivum
RIAMASRLVAAAAAASSSSSASPLARLISRRGLAGAADGHGPAKVPLWKDPLSPSKWKEEHFVLASLSMWGALIYGGFKLFGGKKEDKTEVAPAKA

SEQ ID NO: 10511 - protein, 370 aa, Deinococcus radiodurans R1
MTSPSSTATSSPTTTTAPTPARMRALSKQQPGEGIWMIETEVPTPGPNDLLIRIRKGSICGTDVHIYKWDDWASQTVPVPMVVGHEYVGVVAGMGSEVRGFEIGDRVSGEGHVTCGHCRNCRAGRRHLCRNTQGVGVNRPGSFAEYLVLPAFNAFKLPDDIPDDVAAIFDPFGNAVHTALSFDLVGEDVLITGAGPIGCMAAAVARHVGARNVVITDVNDYRLDLARQMGVTRAVNVAREDLWTVATQELDMHEGFDVGMEMSGSGPAFAQMVSVMNNGGKVALLGIPSGEVQIDWNAVIFKMLTIKGIYGREMFETWYKMAALIQSGLDLTPVITHHYGIGDFQQGFDAMLSGQSGKVILDWETEEQSA

SEQ ID NO: 10512 - protein, 489 aa, Burkholderia cepacia R18194
MSVFGLQRLYIGGGYVDATSGKTFDTFDPATGELLAQVQQASAADVDRAVASAQEGQREWAAMTAMQRSRILRRAVDLLRERNDELAALETRDTGKPIGETLAVDIVTGADVIEYYAGLATAIEGLQVPLRAESFVYTRREPLGVCAGIGAWNYPIQIACWKTAPALAAGNAMVFKPSEVTPLTALKLAEIYTEAGVPAGVFNVVQGDGSVGALLTGHPDIAKVSFTGGVETGKKVMSLAGASSLKEVTMELGGKSPLIVFDDADLDRAADIAVTANFFSSGQVCTNGTRVFVHRSIKDAFTQRVLERVKRIRVGKPTDADTNFGPLVSAAQLDKVLGFIESGKAEGAKLLAGGTRLTDGHFGSGQYVAPTVFGDCRDDMKIVREEIFGPVMSILDFESEDEVIARANDTHYGLAAGVVTENLSRAHRTIHRLEAGICWINTWGESPAEMPVGGYKQSGVGRENGITTLEHYTRIKSVQVELGRYNPVF

SEQ ID NO: 10513 - protein, 510 aa, Photorhabdus luminescens subsp. laumondii TTO1
MCGIGGVFNTENRLIDDIENKLQTIMSKIAHRGDPSRFNEKVVRNNFSIATNRLAIVERDSAYQPISNQEHDLHLVLNGQIYNYKSLRNELIKQGYQFKNGGDAEVALIAYICYGKSFIKKLDGMFSFILFDNKNNKFLLGRDHVGIKPLYYTQKEGNWYVASEIKSLIEFNSEIKPVEPGSIFDGLTSEKYISYDTTIPASSDNVEQAKEKIYSLLDNAVRKRVDTDLPVSIMFSGGIDSTIVLYLAKKYHHDITAISFGLPGSKDIEIAQRYCTENNIKHIIYTFTQEELINNIQDAIYYGEFFEQIDAIDSTIAHFGYYIANRLGFKIALCGEGSDEIFAGYDLFKTYPDPHHLSLYRLNNLHRTDLQRVDRASMRNTVEARVPFMDSALVPYVLSLDFSYKLNNGIEKYILREAFRGKIPEYIIDRPKIRMPDGSGVKNTIIDYVKDIKCNLPRNMVDSLNSIGLTHQSSLYFAEKYLSLGYPLPKERFKESGKDFSESGYFNFIS

SEQ ID NO: 10514 - protein, 232 aa, Bacillus cereus G9241
MLILDGMVMTTEKDEFVYHEMVAHVPLFTHPNPENVLVVGGGDGGVIREVLKHPSVKKATLVEIDGKVIEYSKQYLPSIAGALDNERVEVKVGDGFLHIAESENEYDVIMVDSTEPVGPAVNLFTKGFYAGISKALKEDGIFVAQTDNPWFTPELITTVFKDVKEIFPITRLYTANIPTYPSGLWTFTIGSKKHDPLEVSEERFHEIETKYYTKELHNAAFALPKFVGDLIK

SEQ ID NO: 10515 - protein, 419 aa, Arabidopsis thaliana
MDRISQLSDDLLLQILSFIPGKDVVATSLLSKRWQSLWMLVSELEYDDSYHTGDYKSFSQFVYRSLLSNNAPVIKHLHLNLGPDCPAIDIGLWIGFALTRRLRQLKINIRTSSNDASFSLPSSLYTSDTLETLRLINFVLLDVPSSVCLPSLKVLHLKTVDYEDDASLPSLLFGCPNLEELFVERHDQDLEMDVTFVVPSLRRLSMIDKNYGQCDRYVIDVPSLKYLNITDDAVYDVRQIENMPELVEAHVDITQGVTHKFLRALTSVRQLSLCLSLSEVMCPSGIIFSQLVHLNLSTVVKGWWDLLTSMLQDSPKLQSLKLIDKQHESGLCGIETPIGWKLPSSVPECLLFSLEAFEWIGYKGRRGDREVATYVLKNAACLRTAKFSPESTDVGEKYHMLKELASVPTASTSSKLLFD

SEQ ID NO: 10516 - protein, 415 aa, Dechloromonas aromatica RCB
MNIVIENGRVIDPKNGVDRRASLYVADGKVAGIGQVPAGFVADRSIDAAGCVVCPGFIDLGARLNSIEAELAAAVAGGVTTVVVPPDADPPLDEPELADRLVHRGEEIGKARVLPLGALTLGLKGERLAELAGLKKAGCVAFSQANKTVVDTEALLRALEYAATFDFAVWLQPQDYWLSRNGIAHEGEVASRLGLAGIPVAAETIAIGTIIQLVRDTGCRIHLTRISSAAGMALVHRAQHDGLPISCDVGVHHLLLTENDIGFFNPHARFCPPLRAQTDRQALSDAVVAGWAAICSDHTPVGADDKLLPFGEAKPGATGLEVLLPLTLKWADAAKVDLPTALARITSAPAAVLGLASGQLAIGTTADICIFDPEANWQLTPDALKSRGKNSPWLGYVMTGKVKATLVGGRPVYQA

SEQ ID NO: 10517 - protein, 360 aa, Nostoc punctiforme PCC 73102
MGEPKRIGILTSGGDCSGLNAVIRAVVNCAVDTYGWEVLGIRQATLGLMARPPQFTKLEIDQVDSLLTAGGTMLGTTNKGDPFAFPMTDGSLCDRSEEIIAGYHELGLDALIGIGGDGSLAILRRLAQQGGINLVGIPKTIDNDIGVTEHAIGFDTAVNIATEALDRLHFTAASHSRVMILEVMGRDAGHIAIAAGIAGGANVILIPEIPYTVEHICHKIKERQEKGKNYCLIIVSEAVRTHDGENVTITNRLGQSRYGGIGEYLADKIIEHIGVETRVTVLGHIQRGGTASPLDRLVATAFGVAAVNLIAEDKYDRMVTWQNRQVLSVPITEAIAQYSAVDPNGTLVKTAHGMGIYLGD

SEQ ID NO: 10518 - protein, 307 aa, Staphylococcus epidermidis ATCC 12228
MNAAVRAVTRTAIYNNIEVYGVYQGYQGLLDDDIHKLELGSVGDTIQRGGTFLFSARCPQFKEEDVRKKAIENLRKRGIEGLVVIGGDGSYRGAQRISEECKEIQTIGIPGTIDNDINGTDFTIGFDTALNTIIESVDKIRDTASSHARTFIVEVMGRDCGDLALWAGLSVGAETIVLPEVNTDIKDVAEKIEQGIKRGKKHSIVMVAEGCMSGQECADELTKYINIDTRVSVLGHIQRGGSPSGADRVLASRLGGYAVELLKQGETAKGVGIRNNQLTSTPFDEIFAESDRKFNSQMYELAKELSI

SEQ ID NO: 10519 - protein, 466 aa, Streptomyces viridochromogenes
MFVNGALQPARRHTTVHDRWTGEPVGTVPRDGAEEAAAAVAALAAGRRATTPQQRSAVLTRAADMLTARAEEFSTLITAESGVCRKETLREVSRAAGNLRVAAAEAERIRGESIPLPDGTRLAVTLPEPVGVVLGITPFNRPLNQVVVKAAPALAAGCPLLLKPSEKTPLTALAFAELLVEAGCAKDMLAVVTGEPGEVGPPLAAHPDVAMVTFTGSVATGHAVAAQAAGKRQLLELGGNDPLFVLPDADLRRAAKLAADGSCATAGQSCRGIKRVFVWEEVADEFTALLEPAVAAKRAGDPRREDTDLGPLVSEEAALVVERRIARAVRDGARLVTGGERDGALVRPAVLDHVPPDTELVTEETFGPVAPVIRVRDADEAVRLSNGTAYGLQAGVLTRDSAAFWDIAARLRVGAVNLGEGPHFDSPHIPFGGVKSSGVGREGIRYAIAEMTVTKTVTLPGPYGTG

SEQ ID NO: 10520 - protein, 409 aa, Staphylococcus epidermidis ATCC 12228
MSLRDDALEMHRENQGKLEITPNVKVTNKQQLSLAYSPGVAEPCKEIHEDSRKVYEYTIKGNTVAVVTDGTAVLGLGNIGAEASIPVMEGKAALFKSFAGINGVPIALDTTDTQEIIKTVKLIAPNYGGINLEDISAPRCFEIEETLKKETNIPIFHDDQHGTAIVTMAGLINALKIVDKELTNIKVVLNGSGAAGIAIVKLLHAYGVNNMIMCDSKGAIYSGRNFGMNDTKTYVAKWTNKDKVEGSLEEVIKDADVFIGVSVADILTQDMVKTMADDPIIFAMANPNPEINPNEAKQAGAKVVGTGRSDFPNQINNVLAFPGLFRGALDVEATHINEDMKKAAVEAIVHLIDENELHPDYCIPGPFDKRVAPSVAKNVAKAAMESGVARIKIDTQEIFDKTMKLTDLK

SEQ ID NO: 10521 - protein, 428 aa, Bacillus cereus ATCC 10987
MNYLFKNGRYMNEEGKIVATDLLVQDGKIAKVAENITADNAEVIDVNGKLIAPGLVDVHVHLREPGGEHKETIETGTLAAAKGGFTTICAMPNTRPVPDCREHMEDLQNRIKEKAHVNVLPYGAITVRQAGSEMTDFETLKELGAFAFTDDGVGVQDASMMLAAMKRAAKLNMAVVAHCEENTLINKGCVHEGKFSEKHGLNGIPSVCESVHIARDILLAEAADCHYHVCHVSTKGSVRVIRDAKRAGIKVTAEVTPHHLVLCEDDIPSADPNFKMNPPLRGKEDHAALIEGLLDGTIDMIATDHAPHTAEEKAQGIERAPFGITGFETAFPLLYTNLVKKGIITLEQLIQFLTEKPADTFGLEAGRLKEGRAADITIIDLEQEEEIDPTTFLSKGKNTPFAGWKCQGWPVMTIVGGKIAWQKESALV

SEQ ID NO: 10522 - protein, 393 aa, Synechococcus elongatus PCC 6301
MGKPRIAMTAVSEFRPGLEGVPATLSSISFVDGQRGVLEYRGISIEQLAQQSSFLETAYLLIWGHLPTQQELTEFEHEIRYHRRIKFRIRDMMKCFPDSGHPMDALQASAAALGLFYSRRALDDPEYIRAAVVRLLAKIPTMVAAFQLIRKGNDPIQPRDELDYAANFLYMLTEREPDPVAARIFDICLTLHAEHTINASTFSAMVTASTLTDPYAVVASAVGTLAGPLHGGANEEVLDMLEAIGSVENVEPYLDHCIATKTRIMGFGHRVYKVKDPRAVILQNLAEQLFDIFGHDPYYEIAVAVEKAAAERLSHKGIYPNVDFYSGLVYRKLGIPSDLFTPVFAIARVAGWLAHWKEQLNENRIFRPTQIYTGSHNLDYTPIADRDLAIESD

SEQ ID NO: 10523 - protein, 481 aa, Haemophilus somnus 2336
MNIQHLLKTQAYINGEFISAKNHRTFPVINPANQQVICEITCCGKEETELAIKSAKQAQVHWKKYTAKERSKILKKWFELIMQHQESLAYLLSLEQGKPLSESRAEIAYGASFVEWFSEEAKRAYGEIIPQVREENRLLVIKQPVGVVAAITPWNFPNAMITRKAAPALAAGCAIIIKPAPETPLSALALAALAEQAGIPKGIFNVLPTVYAEEVGSVLTRSTDVRKLTFTGSTKIGKILMQQCADTVKKISLELGGNAPSLIFNDADLDRTVDSVIASKFRNSGQTCICTNRIYVQSEIYRAFADKLKQKVRSFIVGDFQQEAVNIGPLINESAVRKIERHIEDALSKGAILTLGGQRHSLGGTFFEPTILENVSQDMLVCHEETFSPLAALIPFDTEEQAISMANDSEFGLAAYVYTQDFSRIWRLSEELECGLVGVNEGIISNEVSPFGGVKQSGLGREGSRHGLDEFLEMKYLCMKV

SEQ ID NO: 10524 - protein, 337 aa, Oenococcus oeni PSU-1
MNALVLDKMNHLELENLEKPTPKNNEVLIKVAYVGVCGTDKALYQGLPGSADAVPPIVLGHEDSGTVVEIGESVTNFEVGDRVAIDPNIYCHKCDFCRTNRPELCTNLSAVGVTRNGGLEEYVAVPEEVAYKLPDNVSFKQAALTEPLSCVVHGVDLLAIKPFQEAIVLGDGFTGQLFVKTLKAYGVSKVTISTRHLDDEKHVDFLKKVVGADEVVDARSNDFDKDYDVVVEAVGSADVQEQAVKAAAHGGQVLMFGVGKPEQKFSVSSYEIFQKQLTVQGSFINPYTFKAAIAMIAAGKIDPSELVSMELKAAKMNDYLSGKIRTNKAVLNIEAAF

SEQ ID NO: 10525 - protein, 165 aa, Triticum aestivum
PFFHGLKPPSITIRAYLERIMTYSPCSVECFVLALVYVDRIMQANWRFVLTSLNVHRLLLTAVMTGVKYHDDCSYNNAYYAKVGGIPLGELNALEVELLFLLGFDLHVSGEVFERYYSELMKHAPIALGQVTTSSPGLPSVTTITSASPTTTSRLQRHPHPEAAC

SEQ ID NO: 10526 - protein, 396 aa, Pirellula sp. 1
MLCTLKTSLKRDSKLSVITRSVSKRWSCPELHATALGLSDVPTQPFYRQSTGNPMQSAAVVNYAPEPGSVEIREIDRPEIGSQDVLLEVSHVGVCGSDLHQWTAHHSWPVNYPVVLGHEFGGHIVQLGSDVEGWKEGDRVVSETAAIIDSNNPMSRRGLYNLDPTRKGFGYGVNGAMTRYVRVPSRILHEVPHSLAFEHACLTEPCCVAYNAVVRNARIEPGDRVIVMGPGTIGILCAAMARLCGAEVALVGLESDRHRLNIAEENYGCQGIVGDPTDWANQRDGLGCDGVIDAAGSSVTLEIAMQVVRPAGWISKVGWGPQPLGYNLDPLVQKNVTLQGSFSHNWPIWERVLALLTSGQLNVAPIIGGIWPIDQWQTAFDKMHRGEVVKSVLQPI

SEQ ID NO: 10527 - protein, 1993 aa, Lactobacillus gasseri
MVSKNNYSEKMRKIRPQKQRFSIRKFTVGAASVLIGLTFMGVNGRTVKADTTVTQEESINVTNDVANNLKENVENTVSVEEQSAVQHVEQAKTASIETNNDVENNETTNEISSEVAGNNEFVSSAETSAVEEKAANEATTYDAESTKDETVVNNTQNVENNSLQSTESIATPVVENNATTTVEESTPVTETTPVETETKVENVVSPIEETVVEENNQTTVQTDVKEVQSKASVTIPATDTDKYPKEAGALIGDDKYIYQILDLNNTAFWNSSNKKLILSVNRNDLTDENLYAYVTDADYKNMVAEHIIKAGYFKKIEVNNRDFLIVNSGKSNITVGGSSMPVGNATTVVGSTKIIYGLGNITNLDASSVGEIIPVHTEESVIKYYYHNKDGNLVEIPGTDKYPNVSVSGWTGQEFVIDNVDQYKQLIDGFYLDGSNIPSGSFTGTISQFGDGSYYKKVYYSSGNRTEGTVNQLTVDFTVVYRQIDATGKMEVLMYDGSNMDRVIESHTVEAGKSVKFTHNNFTARNPFVTDSAHEVQFIYKDLGSIIPVDENGNQIGDAVKFNNNLTDPIKAGRTDAPIIAGYIADIEYVIPENPGEDIKVIYRLREDVKATITIIDMDNNRNSLAQLNATGKVYSQINFVDLDTTLSNLLDSGYVIISNSFKPGTQFGVHDLNFEIQLKHVLEAVNESQTVQKDIHYVDTVGNELRPSTTQTATFTATGYRDKVTGNIVLVAGTQQVGNDLIATEITDKNASLKWTADKTTFESLKSPDIIGYTTNQKWSTADKVEQNEKLKIENIIYDKKAQVGTIIFWDETSQKQLGTTVNITGNYGEVINYQVIDKVLGSIKDYENNGYILVNNPLGYTTVFGDADYNPGCNDYVVTLKHKIAENSQTKEVNRVITYVYADGPNKGQTAANSVIQKVNFIGKGQYDFVDKVWVSDIVWTAEDGNANYTFAQVNSPKISGYGANRLQVESVLVSGNSNNITEEVLYYANQQTAQIQYIDDVTGKIIGSDTVNGKIDHIISWNLNPEATLKMFENNGYKLVSSDYEFGKDYYYSAEDAKNSFKVHLTRDLIIIDPEDPDSPVYESEDYNKEVTQEIKYVYANGNAAAESNKQTIKFTAYGVVDKTTGKYVVLDENGKVIIGDDGEPIEGKLAWTAEVADPKFTEVSSPIITGYTPDKASVSGTKVTHDLPSKVIVVTYTANDADAKVIFVDKTTGKELEAVTLNGKYGDVINYSTADKIKYYENLGYELVDDGYNGGKFGETTKTFYVTFKHGVVHVHPENPGKPGENINPGGDVKYPTDSGVLNKDVTHTVHYVYADGTIANPSHTQTITFTGSGHINKVTGEYVEVDEDGNIKLDTDGKPVPGKLNWMAMLGNSFLAVTSPQITGHTPSHVQIDGVENVAHDSENYVHTVTYTANAAKAEIVYVDETTGKELEVATVDGKYNEEINYSTADKIKYYESLGYELVKDGYNGGEFGETTKKFYVTFKHGTVVVNPENPGKPDEPINPNDPEGPKYPTDSANLNKDVTHTIHYVYADGTTAKPSHTQTLTFTGSGVIDKVTGQYVEVDENGNIKLDANGKPVPGKLTWVAEDGTTFVEVISPTIAGYTADKTVVNAIEGINQDSNHLETKVVYTANAAKAEIIYIDETTGKELETVTVDGKYNEEINYSTADKIKYYESLGYELVKDGYEQDGKFGLETSRYYVTLKHGTITVTPDDKFTEDDPINPDNPEGPKYPFDSIALDKTITRTIKYVYADGTKAKDDVVQTLRFRGTAVIDKVTGEIIILDENGRKVSDGIKWAALDGTTFVQVISPEIAGYTADKKEIGSVENVDSDTENITETVVYSKNPEKPVEPNKPEEPTEPEVPVEPEKPEAPEAPEEPEKPTESETPEESDQPVEPLKPEASENKPTEATESDKSDAGTLPDNISIDTTAKNVSTVEHKETGKVEAATTNEVSLPQTGHKHSNVGIIGLGLATIASILGLAGTRKRKKN

SEQ ID NO: 10528 - protein, 407 aa, Pasteurella multocida subsp. multocida str. Pm70
MEITLGIAMFTVIVLALAVIILFAKSKLVNSGDITIEINDDPSKAIHLPAGGKLLGALASQGIFVSSACGGGGSCGQCIVKVTEGGGDILPTELSHISKREAKEGYRLSCQVNVKNSMKVELPEEVFGVKKWECTVISNDNKATFIKELKLAIPEGEEVPFRAGGYIQIEAEPHTVAYKDFDIPEEYHEDWDKYNLWRYVSKVDEHIIRAYSMASYPEEKGIIMLNVRIATPPPNNPDAPPGQMSSYIWSLKAGDKVTISGPFGEFFAKETDAEMVFVGGGAGMAPMRSHIFDQLKRLKSKRKMSFWYGARSKREMFYVEDFDTLQAENDNFVWHVALSDPQPGDNWDGYTGFIHNVLYENYLKDHEAPEDCEYYMCGPPIMNASVIKMLKDLGVEDENILLDDFGG

SEQ ID NO: 10529 - protein, 96 aa, Triticum aestivum
AWSRPRYEDLCPSTHNMDVPNVSRREFQLLDITDDGFLSLMNDNGDTKDDVKVPDGEVGDKINKLFKEEEKDTNVIILTAMGEEAAIDAKEAPKGA

SEQ ID NO: 10530 - protein, 296 aa, Glycine max
MAIATETQPQQHKDSSEVSGSAAEQRRWTLNDFDIGKPLGRGKFGHVYLAREKTSNHIVALKVLFKSQLQQSQVVHQLRREVEIQSHLRHPHILRLYGYFYDQKRVYLILEYAPKGELYKELQKCKYFSERRAATYVASLARALIYCHGKHVIHRDIKPENLLIGSQGELKIADFGWSVHTFNRRRTMCGTLDYLPPEMVESVEHDASVDIWSLGVLCYEFLYGVPPFEAKEHSDTYRRIIQVDLKFPPKPIVSSAAKDLISQMLVKDSSQRLPLHKLLEHPWIVQNAEPSGVYRS

SEQ ID NO: 10531 - protein, 406 aa, Vibrio vulnificus CMCP6
MSDTASQVHGAVQTLTQSSDTLFLLLGAIMVFLMHAGFAFLEVGTVRHKNQVNALVKILADFGISTLAYFFIGYWVAYGAHFFADAETLAQGNGYELVKFFFLLTFAAAIPAIVSGGIAERARFYPVLIATFFTVGIVYPLFEGIIWNGNFGIQAWFEATFGVGFHDFAGSVVVHGVGGWIALVAVIFLGMRRGRVRAGKHTNFAPSNIPFLALGAWILCVGWFGFNVMSAQTLNGISGLVAMNSLMAMAGGIVAALIAGKNDPGFIHNGPLAGLVAVCAGSDLMHPLGALVTGSVAGVLFVYLFTYLQNKTKIDDVLGVWPLHGVCGAWGGIAAGIFGQSSLGGLGGVSFTVQLLGTLLGISVALIGAGIVYGAINRLSGLRLSQEDEFNGADLAIHKISSVNAE

SEQ ID NO: 10532 - protein, 193 aa, Candida albicans SC5314
MTRFKSERIAKFAFDFALKNNRKLVTAIHKANIMKLGDGLFRQTVKDVGQDYPGIGVSDLIVDNASMQAVAKPQQFDVLVTPNLYGSILSNIGAALIGGPGLVPGANFGREYAVFEPGCRHVGLDIKGKNSANPTAMILSSAMMLRHLGLNDHADKISKATYDVIAEGNVRTADIGGTATTTEFTEAIINKLD

SEQ ID NO: 10533 - protein, 208 aa, Arabidopsis thaliana
MTSSVIVAGAGDKNNGIVVQQQPPCVAREQDQYMPIANVIRIMRKTLPSHAKISDDAKETIQECVSEYISFVTGEANERCQREQRKTITAEDILWAMSKLGFDNYVDPLTVFINRYREIETDRGSALRGEPPSLRQTYGGNGIGFHGPSHGLPPPGPYGYGMLDQSMVMGGGRYYQNGSSGQDESSVGGGSSSSINGMPAFDHYGQYK

SEQ ID NO: 10534 - protein, 124 aa, Phaseolus lunatus
EPPTEGRLPDATKGSDHLRDVFGKAMGLSDLDIVALSGGHTIGAAHKERSGFEGPWTSNPLIFDNSYFKELLSGEKEGLLQLPSDKALLTDPVFRPLVEKYAADEDAFFADYAVSHQKLSELGF

SEQ ID NO: 10535 - protein, 203 aa, Cucumis sativus
VLTGDSGVGKSNLLSRFSKNEFRFDSRPTIGVEFAYRNIKVADKLVKTQIWDTAGQERFRAITSSYYRGALGALLVYDITRVATFDNIKKWLRELREFGNPEMVIILVGNKCDLHQSREVQEEEARHLAELENLFFMETSAKDNLNVEEAFLEMVRRIHAIASQKTLDLHKKFEKLVAFPNGKEIISIHEVTPTKPNSNCCSL

SEQ ID NO: 10536 - protein, 420 aa, Methanocaldococcus jannaschii DSM 2661
MWGENIATADLFANATDIHSIVQALTTLANASDVFFLVVMGVLVFMMQWGFAMLEGGQVRKKNVNNVMMKNMVDWLIGCVAWLFIGGILCSKGFDLSAFIDWWKQILGTNWPNNGLDLASWFFGLVFCATAATIVSGGVAERIKFSAYVLISLIITGLLYPLFVYLGPWGASIVPWHDYAGSLVVHGLGGFLALGAIAALGPRIGRFVDGRPVPILGHNIPMAVFGAFALAIGWYGFNVGSSLALGDISGLVCATTTMAMAGGGIGALIASRNDVLFTANGIVAGLVAICSGTDVVSPIGGLIIGLIAGLQVPIVYKLVEKAGLDDVCGVVPVHGTAGVIGAILTGILGLKIFGGAGGVSLIDQIIGAVFCIIYGTGLGYILAKIVGIALGGLRVSEEEEKMGLDMAEHKMPAYPEETVI

SEQ ID NO: 10537 - protein, 107 aa, Phaseolus lunatus
NEINLGDYKGRVLIIVNVASQCGLTNSNCTELSQLYEKYKQKGLEILAFPCNQFGAQEPGSNEQIQEFVCTRFKAEFPVFDKVDVNGDKADPLYKYLKSSKGGLFGD

SEQ ID NO: 10538 - protein, 422 aa, Halobacterium sp. NRC-1
MSYDKIEVPEGGAKVSYDEAADELDVPDTPIIPIIHGDGIGKDVGPIAQDVLSAAAEATGHDIEWMEVYAGESAREMYDENLPEETVEAIREHRVAIKGPLTTPVGAGFRSLNVALRQTLDLYANVRPTYYLDGVPSPMKAPEEMDMVTFRENTEDVYAGIEWEAGTDEAEQVRSFVEDEMDFDDVMHDGDIGIGLKPISEKGSKRLVREAIDYAIENDRDTVTLVHKGNIMKFTEGQFGDWGMEVAEEEYPDDEVFAAPDSLWEEQDEVDIPEDAVMVEERLADAMLQWMQLRTDEFDVLAMPNLNGDYLSDAAGAQIGGLGIAPGANFGAGRCLAEPVHGSAPKRAGQDKANPTALILSGRLLFEYIGWDDASTLVRDAVEDTIESGTVTYDLARQRDDAEEVSSTTYAEAVIDRIEDLA

SEQ ID NO: 10539 - protein, 120 aa, Glycine max
QFWGAVLKGPIALLGTGLSPPGPELKVLGGGGFLKAWGGISFLRFNFPGAWSYGKKYGLFLGPLFFLWGKKPAPLGGLESKGALAVGTPADFVVWPPELGFALGDDYPVFPHPFVCFPCF

SEQ ID NO: 10540 - protein, 197 aa, Bacillus subtilis subsp. subtilis str. 168
MTNRDIVWHEASITKEEYQQKNKHKSSILWLTGLSGSGKSTIANAAARELFEQGYQVIVLDGDNIRHGLNRDLGFSDEDRKENIRRIGEVAKLFVQQGTIVITAFISPFREDRQQVRELVEAGEFNEVYIKCDLDICEQRDPKGLYKKARNGEIPFFTGIDSPYEEPEAPELVLDSGQHDREACKNQLIEFVKQKLS

SEQ ID NO: 10541 - protein, 535 aa, Glycine max
MGVLSSHRIQLLLFPIVVLLWSASAANSANNTFLHCLVNHSEPSHPITSAIFTPNNTSFSSVLEAYIRNLRFNTSTTRKPFLIITALHVSHIQASIICAQKHNLQMKIRSGGHDYEGVSYVAEVPFFILDMFNLRTIEVDIGTETAWVQAGATLGEVYYRIAEKSKTHAFPAGVCHTVGVGGHISGGGYGNMMRKYGLSVDNVIDAQMVDVQGRLLDRKSMGEDLFWAITGGGGASFGVVLAYKIKLVRVPEIVTVFQVGRTLEQNATDIVYNWQHVAPTIDNDLFLRVILDVVNGTRNGTKTVRARFIALFLGDSKSLVSLLNDKFPQLGLKQFDCIETTWLRSVLFWDNIDIATPVEILLERQPQSFKYLKRKSDYVKKPISKEGWEGIWNKMIELEKAIMYFNPYGGRMAEIPSTASPFPHRAGNLWKIQYQANWNKPGKEVADHYINLTRKLHKFMTPFVSKNPREAFYNYKDLDLGINPNGKNSYAEGRVYGVEYFKDNFDRLVQIKTKVDPHNFFRNEQSIPTLSYRKG

SEQ ID NO: 10542 - protein, 268 aa, Bifidobacterium longum DJO10A
MLNNGTVIPQVGLGVFQTPDGDTTVNAVQTALENGYRHIDTAMIYHNEASVGEGIRRAGVPRSDFFLTTKLWNDDIRARCGKDAFQESLDRLGVDYVDLYLIHWPADGWQQAWDDLQEIYASGRAKAIGVSNFQKHHIDELLTHSDVVPAVDQVESSPQFTNQELIGQLRAKGIHTEAWSPLGGTGGNLLSNPVLAGIGAKYGRSAAQVVIRWHIQRGIVVLPKSTHAERIKQNFEVFDFNLSVDDMTAISAINTGKRNGADPDNFNF

SEQ ID NO: 10543 - protein, 325 aa, Magnaporthe grisea 70-15
MADQHDVDLDSIIDRLLEVRGSRPGKQVQLLEAEIRYLCTKAREIFISQPILLELEAPIKICGDIHGQYYDLLRLFEYGGFPPEANYLFLGDYVDRGKQSLETICLLLAYKIKYPENFFILRGNHECASINRIYGFYDECKRRYNIKLWKTFTDCFNCLPIAAIIDEKIFTMHGGLSPDLNSMEQIRRVMRPTDIPDCGLLCDLLWSDPDKDITGWSENDRGVSFTFGPDVVSRFLQKHDMDLICRAHQVVEDGYEFFSKRQLVTLFSAPNYCGEFDNAGAMMSVDESLLCSFQILKPAEKKQKYVQRLGGRSSNASSRITSSKP

SEQ ID NO: 10544 - protein, 73 aa, Triticum aestivum
MASRSCTFVEILLAVILPPLGVFLRYGCCSMEFLICLLLTILGYIPGIIYAVYVLVAHGSASEESGRDYDALG

SEQ ID NO: 10545 - protein, 196 aa, Glycine max
  misc_feature (146)..(146): Xaa can be any naturally occurring amino acid
HPVPWPKRLVLFYLYPSKSQVWGENFDHKKLVITTLAANGKKEESNGAPNDTYPAFPGWYADVSWPGEAHTYNIEKILFHGKSEFQELLVFESSRQGKVAILDGHIQLTENDEFAYQEMLTHLALCSIPDPKKVLLIGGGDGGILXEISPHSSGEHIDICELDAMVIDVYSVVFHDITYGCKESQLRVHMSNGVAL

SEQ ID NO: 10546 - protein, 415 aa, Magnetospirillum magnetotacticum MS-1
MFILLGAVMVLAMHSGFAFLEVGTVRKKNQVNALVKIISDFAVSTIAYFFVGYGVAYGTNFLVGADVLIGKTGNAFAASGYDLVKFFFLATFAAAIPAIVSGGIAERAKFTTQLMATAILVGLVYPLFEGMVWGTRFGFQELMKGWFGAAFHDFAGSVVVHAVGGWIGLGAVLMLGTRLGRYRKDGRLVAFPPSNIPFLALGAWILSVGWFGFNVMSAQVIADISGLVAMNSLMAMVGGILTSLVVGRNDPGFIHNGALAGLVAVCAGSDVMHPIGALVTGGIAGALFVWLFNLCQIKWKIDDVLGVWALHGMCGFLGGVACGVFGQEALGGLGGVSFGGQIAGTVIGAAFGLAGGLAVYGGLKAAFGIRLSDEEEFAGADLSIHQIGAYPEDATTVHDDGLAMSVHSANKRKAG

SEQ ID NO: 10547 - protein, 249 aa, Zea mays
MFGYQKGLDVEAGTSGAAATGGARQLYPGMQESPELRWALIRKIYVILSLQLLLTAVVAAVVVKVRAIPHFFTTTSAGLGLYIFLIILPFIVLCPLYFYHEKHPVNLILLGLFTVAISFAVGMTCAFTSGKVILESAILTTVVVLSLTAYTFWAVNRGKDFSFLGPFLFAAIIVLLVFALIQILFPLGKLSQMIYGGLASLIFSGYIVYDTNNIIKRYTYDQYVWAAVSLYLDVINLFLSLMTLFRAAD

SEQ ID NO: 10548 - protein, 268 aa, Acinetobacter sp. M-1
MRIPQFGLGTFRLKDQAVIDSVKTALEVGYRAIDTAQVYENEAAVGQAIAESGVARQDLFLTTKIWVDNFAEDKFIPSLKDSLQKLRTDAVDLTLIHWPAPALGVSIPSVMQLLLEAKQQGLTKQIGISNFNIALTQQAIDSIGIEHIATNQIELSPYLQNRNLVNYLREQNIDVTSYMTLAYGKVLQDPTLIEIAAQHQATTAQVALAWALQNGFAVIPSSTKRENLISNLKAQDLTLSAEEMQLIAQLERNGREVSPEPFAPEWDK

SEQ ID NO: 10549 - protein, 224 aa, Listeria monocytogenes EGD-e
MINQKKIAGEKACEWIKDGMVVGLGTGSTVYYTIEKLGEMVNNGLHITGVATSEETNKQAQNLGIPLKSLNDVTEIDITIDGADEIDTDFQGIKGGGGALLREKMVASASLKNIWVVSEEKLVRNLGKFPLPLEVIPFGWKQVERKLEKEHIQTNLRKQSSGEVYVTNNGNYILDIVNQTFTDAEMWQEKLAQIPGIVEHGLFLHYVDIIICAKANGEIELIKK

SEQ ID NO: 10550 - protein, 365 aa, Glycine max
MGSAAETQITPTHVSDEEANLFAMQLASASVLPMVLKSALELDLLEIIAKAGPGVHLSPTDISSQLPTQNPDAPVMLDRILRLLACYNILSFSLRTLPDGKVERLYGLAPVAKYLVKTEDGVSIAALNLMNQDKVLMESWYYLKDAVLEGGIPFNKAYGMTAFEYHGTDPRFNKVFNKGMADHSTITMKKILETYTGFEGLKSLVDVGGGTGAVVNMIVSKYPTIKGINFDLPHVIGDAPSYPGVEHVGGDMFVSVPEADAIFMKWICHDWSDEHCLKFLKNCYEALPDNGKVIVAECILPVAPDSSLATKGVVHIDVIMLAHNPGGKERTEKEFEALAKGSGFQGFRVLCCAFNTYVMEFLKKV

SEQ ID NO: 10551 - protein, 389 aa, Streptococcus bovis
MSTKDVKELAIEQAKKFGGKLEVCPKVPIETKADLGIAYTPGVAAVSSAIYEKKERAYELTTKKNTVAVISDGSAVLGLGNIGPEAAMPVMEGKAALFKRFAGVDSIPLVLDTQDTEEIIQTVKFLAPTFGGINLEDISAPRCFEIEQRLIDELDIPVFHDDQHGTAIVVLAALYNSLKLINKKIEDIHVVINGGGSAGLSITRKFLAAGVKHIIIVDRTGILSETDTALPPHHAEIAKLTNREHRTGDLATALEGADVFVGVSAPGVLKPEWIQQMNEQPVIFAMANPVPEIFPDEALAAGAYIVGTGRSDFPNQINNVLAFPGIFRGALDARAKKITIEMQIAAAKGIAKLIPDNELTPTNIIPDPFQEGVAKVVAESVRNAVKETN

SEQ ID NO: 10552 - protein, 197 aa, Sulfolobus acidocaldarius
MTQGPNYRIKFRRRREGKTDYYTRYTYVINNAIRFVPRLTNKYVIVSVSKFDQKGDIMIAYAHSIELVKKYGWKGDTNNTPAAYLTGYLAGLRAVKSGVKAAVSDIGLFVPVKGGRIFAVIKGAIDAGLKVPVGDLGKLKDRVNGSHISAYAQKLKNENQELYNKLFSSYIQRGLDPVLLPQHFEEVLNKIKENGGK

SEQ ID NO: 10553 - protein, 423 aa, Pseudomonas aeruginosa
MTISIRGARVIDPASDLDQVGDLHIEAGKIVAIGAAPAGFSAQKTLDGAGLVAAAGLVDLSVALREPGYGRKGNVESETRAAAAGGTTSLCCPPYTRPVLDTPAVAELILDRAREAGNAKVYPIGALTRGFGGEQLSELVALRDTGCVAFTNGLHGFASNRILRRALEYAATFDLTVIFTSQDTDLAEGGLAHEGPTASFLGLAGIPETAETVALARNLLLVEQSGVRAHFSQLTSARGIELVAQAQARGLPVTCDVALYQLILTDEALVGFSSLYHVQPPLRTRADREALREAVNNGVVQAIASHHQPHEPDAKNAPFAATEPGISGAELLLPLAMTLVQDGLLDLPTLLARLSHGPAQALRLPAGRLAVGQAADLVLFDPQGSTLAGESWYSKGQNSPFVGHCLPGRVRYTLVDGHLTHEG

SEQ ID NO: 10554 - protein, 468 aa, Ralstonia solanacearum
MAYPPIPVPADAAPSANTAWQARSRAAVWHPCTQNARLDAMPPLPIARGQGPWLIDFDGKRYLDGTSSWWVNLFGHANPHINAALKAQLDMLEHTMLAGATHRPAVELAERLVGLTGGVLGHSFFGSDGASAVEIALKMSFHAHRNAGQGARSRFVCLEHGYHGETLGALGVTDVAIFRDAYDPLILQSHRVASPDARLAGPGETGADVAERALAALRDCLSANAGTIAAVIIEPLVQCAAGMAMHDASYLRGVRALCDQFGVHWIADEIAVGCGRTGTFFACEQAGVWPDLLCLSKGISGGYLPLSIVLSRDAIYDAFNEDAPVRSFLHSHSYTGNPLACRAALATLDLFAEEDVFARNRVTAARIAQGLAPLSHDARFAHLRQAGMITAFDVHPEVAGPRFAERFALTARAHGLLLRPIGHTVYLLPPYVLTDDETDTLVERTLHTLEDTLAQATGAHEGETHAIA

SEQ ID NO: 10555 - protein, 386 aa, Medicago sativa
MAIHHHHHNHQQLQQHTSSLFDALYCDEEEKWEDDDEGEVVDEGAQSDVTTTNYDILDSTSLLPLLLLEQNLFNEDEELNTLFSKEITQQETYYEDLKNVINFDSLSQPRREAVEWMLKVNAHYGFSALTATLAVNYLDRFLLSFHFQKEKPWMIQLVAVTCISLAAKVEETQVPLLLDLQVQDTKYVFEAKTIQRMELLILSTLKWKMHPVTTHSFLDHIIRRLGLKTNLHWEFLRRCENLLLSVLLDSRFVGCVPSVLATATMLHVIDQIEQSDDNGVDYKNQLLNVLKISKEKVDECYNAILHLTNANNYGHKRKYEEIPGSPSGVIDAVFSSDGSNDSWTVGASSYSTSEPVFKKTKNQGQNMNLSPINRVIVGILATATSP

SEQ ID NO: 10556 - protein, 489 aa, Haloarcula marismortui ATCC 43049
MSQPDSQTAWDRLYIDGEWRDAGTSETIPVTNPATGDEIAAVPAGTEGDVNDAYQAAEAAQSDWAALSREERNEYVQAMIGVMQERLDEIVELLATESGSVQAKATAEANFAMADFQSALEMVPPEEEVRDSMYHEDKDHHIVREPAGVVGIISPWNFPLHLTTRALGPALALGNTVVIKPATDTPITGGLLLADIAEEAGLPDGVVNVVTGHGSDIGDRMAGHPTARVMSFTGSTAVGRSVASQAGDALALPALELGGNGPFVVTEDADIEAAAKAGSVGAFGHQGQVCISINRHLVHEDVYDEYVEKLVEHAESLTIGNPLDEDVEFGPIINESQVEQLTSFIEQTVDAGATLETGGEVEDLFLEPTVLSECTNDMSAACNEHFGPVAPVIPFESDEEAVELANDTEYGLAAGVYSSDVEHGRSIADQIDAGMVHVNDHPIQDEPNAPFGGMKNSGLGRYNGEWIMDELTETKWISVQHEERDYQLL

SEQ ID NO: 10557 - protein, 208 aa, Glycine max
  misc_feature (130)..(130): Xaa can be any naturally occurring amino acid
  misc_feature (157)..(157): Xaa can be any naturally occurring amino acid
  misc_feature (168)..(168): Xaa can be any naturally occurring amino acid
  misc_feature (179)..(179): Xaa can be any naturally occurring amino acid
  misc_feature (185)..(185): Xaa can be any naturally occurring amino acid
  misc_feature (190)..(190): Xaa can be any naturally occurring amino acid
  misc_feature (192)..(193): Xaa can be any naturally occurring amino acid
  misc_feature (204)..(204): Xaa can be any naturally occurring amino acid
  misc_feature (206)..(206): Xaa can be any naturally occurring amino acid
MSQLGVALQESLRTQREARSTILGLLREQMDGVDGGTRRRRSLKERFGFIGMGCCGASWGFRSDALSVNQGEQEQQQETDPGRVAAPECVGPAGSGSGMNLAAALAAERQLRVPQEEGGGVRAPWRVSLXRLLEETEGGDAAPAEKEKEKEENVLGXDSVCCVCMGRXKGAALIPCGHXFCRVCXRELWXNXXSCPLCNRSILXIXDI

SEQ ID NO: 10558 - protein, 289 aa, Zea mays
  misc_feature (69)..(69): Xaa can be any naturally occurring amino acid
  misc_feature (80)..(80): Xaa can be any naturally occurring amino acid
  misc_feature (88)..(88): Xaa can be any naturally occurring amino acid
  misc_feature (93)..(93): Xaa can be any naturally occurring amino acid
  misc_feature (136)..(136): Xaa can be any naturally occurring amino acid
  misc_feature (141)..(141): Xaa can be any naturally occurring amino acid
  misc_feature (204)..(204): Xaa can be any naturally occurring amino acid
  misc_feature (237)..(237): Xaa can be any naturally occurring amino acid
  misc_feature (269)..(269): Xaa can be any naturally occurring amino acid
  misc_feature (273)..(273): Xaa can be any naturally occurring amino acid
  misc_feature (278)..(278): Xaa can be any naturally occurring amino acid
MGGGRVMATAAKVAGIGVAKGGFRGGFGVPAAANDQFIVRNTSASKPVSASISSAGHPSVEEDAVVMRXPVWEDEWEFAXVETKTIPXGVFDXPPSLQEAKESTDDLKDAFTLPWMEGSNGSWSWFKMCSRFPPNXNSPLXSNFIVFKHKAFAFLSENTAAQSVVTSIASDPKVWDAVMENKDLMKFLETNTASTKDEADNDDXSELSSETESEEDSEEKPIQLMEILRDMKLKAVXMMENVSSYFGGLFRTETFTEGGQERKRMLLNXPTTXLGLAXLRYFMVVLKRA

SEQ ID NO: 10559 - protein, 370 aa, Glycine max
MAALSNGHGSSFFKMPPIKFTKLFINGEFVDSLSGREFETRDPRTGEVITRIAEGAKEDVDVAVKAARAAFDYGPWPRMPGAERAKIMMKWADLVDQNIEEIAALDAIDAGKLYHWCKAVDIPAAASTIRYYAGAADKIHGEVLKASREFHAYTLLEPIGVVGHIIPWNFPSTMFVAKVSPSLAAGCTMVLKPAEQTPLSALFYAHLAKLAGIPDGVLNVVPGFGQTAGVAISLHMDIDKVSFTGSTEVGREVMRAAANSNLKPVSLELGGKSPVIVFDDADVDKAAELALLGILFNKGEICVAGSRVLVQEGIYDEFEKKLVEKAKAWVVGDPFDPKVQQGPQVDKFSSKSASAYKKTQTNGVTLFWTP

SEQ ID NO: 10560 - protein, 414 aa, Escherichia coli
SKVVVPAQGKKITLQNGKLNVPENPIIPYIEGDGIGVDVTPAMLKVVDAAVEKAYKGERKISWMEIYTGEKSTQVYGQDVWLPAETLDLIREYRVAIKGPLTTPVGGGIRSLNVALRQELDLYICLRPVRYYQGTPSPVKHPELTDMVIFRENSEDIYAGIEWKADSADAEKVIKFLREEMGVKKIRFPEHCGIGIKPCSEEGTKRLVRAAIEYAIANDRDSVTLVHKGNIMKFTEGAFKDWGYQLAREEFGGELIDGGPWLKVKNPNTGKEIVIKDVIADAFLQQILLRPAEYDVIACMNLNGDYISDALAAQVGGIGIAPGANIGDQCALFEATHGTAPKYAGQDKVNPGSIILSAEMMLRHMGWTEAADLIVKGMEGAINAKTVTYDFERLMDGAKLLKCSEFGDAIIENM

SEQ ID NO: 10561 - protein, 451 aa, Zea mays
MAYAARRKKRLGRYEVGRTIGQGTFAKVKFAVDSDTGAPVAMNELELPYTKSQRSERRSKIKREISIMKIVRHPNIVRLNEVLAGRTKIYIVLELVTGGELFDRIVRHGKLRENEARKYFQQLIDAIDYCHSKGVYHRDLKPQNLLLDSRGNLKLSDFGLSTLSQNGVGLVHTTCGTPNYVAPEVLSSNGYDGSAADIWSCGVILYVLMAGYLPFEENDLPHLYEKITAAQYSCPYWFSPGAKSLIQRILDPNPRTRITIEEIREDPWFKKNYVTIRCGEDENVSLDDVQAIFDNIEDKYVSDEVTHKDGGPLMMNAFEMIALSQGLDLSALFDRQQEFVKRQTRFVSRKPAKTVVATIEVVAESMGLKVHSRNYKVRLEGPASNRASQFAVVLEVFEVAPSLFMVDVRKVAGDTPEYHRFYENLCSKLCSIIWRPTEVSAKSTPLRTTTC

SEQ ID NO: 10562 - protein, 283 aa, Pediococcus pentosaceus ATCC 25745
MNNLTDTYTLNNGVKIPVVGFGTWQSKDGDEAYNAVKAALEAGYRHIDTAAAYGNEESVGKAIKDSGIDRKELFITSKLWNRDHGYESAKKALDTSLAKLGTDYLDLYLIHWPNPVQFRDEWQQRNADSWRAMEEALDAGKVRAIGVSNFRAHHLDELLKTAKVTPAVNQIFLNPSDTEDEVVAYNKEHGILSEAYSPLGTGKIFTIPELKDIAAKYNKSVAQVVLRWSLQHGFLPLPKSVHADRIKQNTEIFDFELSDDDIKKIDGFHGVAGLAQDPDATDF

SEQ ID NO: 10563 - protein, 213 aa, Zea mays
  misc_feature (199)..(199): Xaa can be any naturally occurring amino acid
MDDEEHEVYGQEIPEDGDMDGADVDMAAAGDDAAKLQELDEMKRKLKEMEEEAAALRDMQAKVAKEMQGGDPSISTAEAKEQVDARSVYVGNVDYACTPEEVQQHFQACGTVNRVTILTDKFGQPKGFAYVEFLEQEAVQEALNLNESELHGRQIKVAPKRTNVPGMKQRPPRGYNPYHGYPYRSYGAPYFPPYGLWGXAPRFRRPMRYRPYF

SEQ ID NO: 10564 - protein, 406 aa, Glycine max
  misc_feature (201)..(201): Xaa can be any naturally occurring amino acid
  misc_feature (215)..(215): Xaa can be any naturally occurring amino acid
MVLEATMICIDNSEWMRNGDYSPSRFQAQADAVNLICGAKTQSNPENTVGVLTMAGKGVRVLVTPTSDLGKILACMHGLDIGGEMNLAAGIQVAQLALKHRQNKKQQQRIIVFAGSPVKHEKKMLEMIGRKLKKNSVALDIVNFGEEDEGKTEKLEALLAAVNNNDTSHIVHVPSGPNALSDVLISTPIFTGDGEGGSGFXAAAAAAAAAGGVSXFEFGVDPNLDPELALALRVSMEEDRAKQEAAAKKAAEDAAKQEKGGEQQASSQDATMTERASAAMSEAENKTSDLMDDENALLQQALAMSMDDPAISHDVKDTDMSEASASDPDLALALQLSIADSTKDQGSQSDMSKLLADQSFVSSILASLPGVDPNDPSVKDLLASMQNQSEPQQKNDDKPSNEEEKK

SEQ ID NO: 10565 - protein, 108 aa, Hyacinthus orientalis
LTVSVASGQYFCLHFEAFQLGMAPVYRAFLRFMGDDSEAKNYSYSREVGATGRKMIWQGVPRSIRDSHRKVRDSYDAIVIQRNIALFFSGGDRKELKLRVTGRIWKEQ

SEQ ID NO: 10566 - protein, 283 aa, Streptococcus agalactiae 2603V/R
MATIQWFPGHMSKARRQVQENIKHVDFVTILVDARLPLSSQNPMLTKIVGDKPKLMILNKADLADPIRTKEWRDFYESQGLKTLAINSKEQSTVKKVTDIAKILMSDKIANLRGRGIQKETLRTMIIGIPNAGKSTLMNRLAGKKIAVVGNKPGVTKGQQWLKSNKELEILDTPGILWPKFEDELVGLKLALTGAIKDQLLPMDEVTIFGLNYFKTYYPDRLKERFKSINLEDEAPEIIMALTQKLGYRDDYDRFYNLFVKEVRDGKLGRYTLDIVGEHDGNN

SEQ ID NO: 10567 - protein, 503 aa, Hordeum vulgare subsp. vulgare
MVAPAKIPQRQLFIDGEWRAPALGRRLPVINPTTEVSIGEIPAGTSEDVDAAVAAARAALKRNRGRDWSRAPGAVRAKYLRAIAAKMIERKSDLARLEALDCGKPLDEAAWDMDDVAGCFEFFAGHAEALDKRQNAAVALPENFKCHLKKEPIGVVALITPWNYPLLMAVWKVAPALAAGCTAVLKPSELASVTCLELGDVCKEVGLPSGVLNIVTGLGNEAGAPLSSHPDVDKVAFTGSYATGQKIMVAAAPTVKPVTLELGGKSPIVVFDDVDIDKAVEWTLFGCFWTNGQICSATSRLLIHKNIAKEFVDRMVAWSKNIKVSDPLEEGCRLGPVVSEGQYEKIKKFVANAKTEGATILTGGVRPKHLEKGFFIEPTIITDINTSMEIWREEVFGPVLCVKEFSTEEEAIELANDTHYGLAGAVISGDRERCQRLAEEIEAGCIWVNCSQPCFCQAPWGGNKRSGFGRELGEGGIDNYLSIKQVTEYTSDAPWGWYKAPAN

SEQ ID NO: 10568 - protein, 156 aa, Burkholderia cepacia R18194
MTSDDLTPGGRVRAANVFDRGDCKGGNHSPQLTWHNPPPGTHGYAVTIFDPDAPGHGWWHWAVAGIPATVTSLPADASASGFLRRIGASEARNDFGIDGYGGPCPPPGKPHRYVITVYALKGDDLRVAQGRPAPMFEHEIGTLAIGTAQLTVNYGQ

SEQ ID NO: 10569 - protein, 506 aa, Hordeum vulgare subsp. vulgare
MAAPPAIPRRGLFIGGGWREPTLGRRIPVINPATEDTIGDIPAATAEDVELAVAAARSAFLLDGGSRWARASGATRAKYLNAIAAKIKEKISYLALLETVDSGKPKDEAVADMDDVAACFEYYAALAEALDGKQHAPISLPMEEFKTYVLKEPIGVVGLITPWNYPLLMATWKVAPALAAGCTAVLKPSELASLTCLELGAICEEIGLPSGVLNIITGLGPDAGAPIASHPHVDKIAFTGSTATGKTIMTAAAQMVKPVSLELGGKSPLVIFDDVADIDKAVEWAMFGCFFNGGQVCSATSRLLLHEKIAERFLDRLVEWAKNIKISDPLEEGCRLGSVISKGQYEKIKKFISTARSEGATILHGGDRPKNLGKGFFIEPTIITGVSTSMQIWREEVFGPVICVKVFKTESEAVELANDTHYGLAGGVISDDLERCERIAKVIHSGIVWINCSQPTLVQAPWGGNKRSGFGRELGEWGLENYLSVKQVTRYCKDELYGWYQRPSKL

SEQ ID NO: 10570 - protein, 385 aa, Neurospora crassa
MLSRNSMRLARAVAQPTPRLARGFASVQDTPAQTLQSDIFKPTKYGGKYTVTLIPGDGIGAEVAESVKTVFKADNVPITWEQIEVSGVQDNASRTEEAFQQAVASLRRNKLGLKGILHTPISRSGHQSFNVAMRQELDIYASISLVKNLPGLQTRHKDVDLCIIRENTEGEYSGLEHQSVDGVVESLKIITRAKSERITKFAFQFALANQRKKVTCIHKANIMKLADGLFRGTFNRLAKDFPQLECNDMIVDNASMQCVSKPQQFDVMVMPNLYGGILSNIAAALVGGPGVVPGCNMGRDVAVFEPGCRHVGLDIQGKDQANPTALLLSGTMLLRHLGLDDHANRISNAVYDVIAQGKVRTRDMGGEASTHEFTRAILDSMEKSL

SEQ ID NO: 10571 - protein, 274 aa, Listeria monocytogenes str. 4b F2365
MNLKYTVKLANGVEMPRLGFGVWKVQDGDEAVNSVKWAIEAGYISIDTAAAYKNEEGVGQAIKESGVKREDLFVTTKLWNAEQGYESTLAAFDESLRKLELDYVDLYLIHWPVKGKFKDTWRAFEKLYKDKRVRAIGVCNFHEHHLKELMEDAEIAPMVNQIELHPQLTQEPLRKFCAENNIVVEAWSPLGNGKLLSNPEIKAIADAHGKSVAQVILRWDLQIGVVTIPKSVHQERIIQNADIFDFELSEEEVAKISGLNKDERTGPDPDNFNF

SEQ ID NO: 10572 - protein, 493 aa, Catharanthus roseus
MDYLTIILTLLFALTLYEAFSYLSRRTKNLPPGPSPLPFIGSLHLLGDQPHKSLAKLSKKHGPIMSLKLGQITTIVISSSTMAKEVLQKQDLAFSSRSVPNALHAHNQFKFSVVWLPVASRWRSLRKVLNSNIFSGNRLDANQHLRTRKVQELIAYCRKNSQSGEAVDVGRAAFRTSLNLLSNLIFSKDLTDPYSDSAKEFKDLVWNIMVEAGKPNLVDFFPLLEKVDPQGIRHRMTIHFGEVLKLFGGLVNERLEQRRSKGEKNDVLDVLLTTSQESPEEIDRTHIERMCLDLFVAGTDTTSSTLEWAMSEMLKNPDKMKKTQDELAQVIGRGKTIEESDINRLPYLRCVMKETLRIHPPVPFLIPRKVEQSVEVCGYNVPKGSQVLVNAWAIGRDETVWDDALAFKPERFMESELDIRGRDFELIPFGAGRRICPGLPLALRTVPLMLGSLLNSFNWKLEGGMAPKDLDMEEKFGITLQKAHPLRAVPSTL

SEQ ID NO: 10573 - protein, 502 aa, Triticum aestivum
  misc_feature (121)..(121): Xaa can be any naturally occurring amino acid
  misc_feature (249)..(249): Xaa can be any naturally occurring amino acid
MVATAKIPQRQLFIDGDWRAPALGRRLPVINPTTEASIGEIPAGTSEDMDAAVAAARAALKRNRGRDWSRAPGAVRAKYLRAIAAKMIERKSDLARLEALDCGKPLDEAAWDMDDVAGCFXFFAGHAEALDKRQNAAVALPENFKCHLKKEPIGVVALITPWNYPLLMAVWKVAPALAAGCTAVLKPSELASVTCLELGDVCKEIGLPSGVLNIVTGLGNEAGAPLSSHPDVDKVAFTGSYATGQKIMXAAAPTVKPVTLELGGKSPIVVFDDVDIDKAVEWTLFGCFWTNGQICSATSRLLIHKNIAKEFVDRMVAWSKNIKVSDPLEEGCRLGPVVSEGQYEKIKKFVANAKSEGATILTGGVRPKHLEKGFFIEPTIITDINTSMEIWREEVFGPVLCVKEFSTEEEAIELANDTHYGLAGAVISGDRERCQRLAEEIDAGCIWVNCSQPCFCQAPWGGNKRSGFGRELGEGGIDNYLSIKQVTEYTSDAPWGWYKAPA

SEQ ID NO: 10574 - protein, 594 aa, Triticum aestivum
  misc_feature (517)..(517): Xaa can be any naturally occurring amino acid
PRVRFNHLYDPLSLVRDHRVKQVLGAEGITVQSFNSDLLYEPWEVLDDHGCPFTMFTPFWNTCLCMVDPPAPMLPPKRINSGELSRCCSSDDLIFEDESERGSNALLARAWSPGWQNADKAFTAFINGPLIDYSVNRKKADSANTSLLSPYLHFGELSVRKVFHQVRMKQLTWSNESNGDGEEGCSLFLRSIGLREYSRYLAFNHPCSHEKPLLAHLRFFPWVVNEVYFKVWRQGRTGYPLVDAGMRELWATGWLHDRIRVVVSSFFVKVLQLPWRWGMKYFWDTLLDADLESDALGWQYISGSLPDGRELDRIDNPQFEGYKFDPYGEYVRRWLPELARLPTEWIHHPWDAPESVLQAAGIELGSNYPLPIVELDEAKSRLQDALSEMWELEAASRAEIENGMEEGLGDSSDEPPIAFPQELQHMEVDLDRATIHTPAMAGRRRADQMVPSITSSFFRAETETELSAAFESQVTRPEVPSQVHFQPQTRTEIRDEVASYGTAARYNGVQQQQQQYXYTITVCRCGIAPSTSEASSSWTGREGGVVPAWAPPAASGHSDPYAADETDISGRSYLDRHPQQSHRLMNWNQLSQSS

SEQ ID NO: 10575 - protein, 46 aa, Aeromonas hydrophila
EKGFGFISPTDGSKDVFVHFSAIQTPGFKTLDEGQRVEFTIEQGQK

SEQ ID NO: 10576 - protein, 426 aa, Glycine max
MSEKEKGNNSEGQSTLLHGKYELGRVLGHGTFAKVYHARNLNTGQHVAMKVVGKEKVIKVGMMEQVKREISVMKMVKHQNIVELHEVMASKSKIYIAMELVRGGELFNKVSKGRLKEDVARLYFQQLISAVDFCHSRGVYHRDLKPENLLLDEHGNLKVSDFGLTAFSDHLKEDGLLHTTCGTPAYVSPEVIAKKGYDGAKADIWSCGVILYVLLAGFLPFQDDNLVAMYKKIHRGDFKCPPWFSLDARKLVTKLLDPNPNTRISISKVMESSWFKKPVPRKLAAEKVDLEEEKIESQLETINAFHIISLSEGFNLSPLFEDKRREEMRFATAGTPSTVISRLEEVAKAGKFDVRSSETKVRLQGQERGRKGKLAIAADIYAVTPSFMVVEVKKDNGDTLEYNQFCSKQLRPALKDIFWNSAPASA

SEQ ID NO: 10577 - protein, 431 aa, Arabidopsis thaliana
MAEDSNSSESIIVNVTGDDNKSALFGKYDLGKLLGSGAFAKVYQAEDLQNGGESVAIKVVQKKRLKDGLTAHVKREISVMRRLRHPHIVLLSEVLATKTKIYFVMELAKGGELFSRVTSNRFTESLSRKYFRQLISAVRYCHARGVFHRDLKPENLLLDENRDLKVSDFGLSAMKEQIHPDGMLHTLCGTPAYVAPELLLKKGYDGSKADIWSCGVVLFLLNAGYLPFRDPNIMGLYRKIHKAQYKLPDWTSSDLRKLLRRLLEPNPELRITVEEILKDPWFNHGVDPSEIIGIQADDYDLEENGKILNAFDLISSASSSNLSGLFGNFVTPDHCDQFVSDESTAVIMRKVEEVAKQLNLRIAKKKERAIKLEGPHGVANVVVKVRRLTNELVMVEMKNKQRDVGLVWADALRQKLRRLINQPVYKVPDKP

SEQ ID NO: 10578 - protein, 220 aa, Zea mays
  misc_feature (77)..(77): Xaa can be any naturally occurring amino acid
  misc_feature (98)..(98): Xaa can be any naturally occurring amino acid
  misc_feature (112)..(112): Xaa can be any naturally occurring amino acid
  misc_feature (132)..(132): Xaa can be any naturally occurring amino acid
MSATSKAAIREMDARMFGLENPLVAALHHLLDVPHTPRITIRNELIPNQHSKSATSKAATREMDARMFGLETPRVAXALHHLLDVPDGDKAGGGATRXTYVRDARAMAATPXADVKELAGAYAFVVDMPGLXGTGDIRVQVEDERVLVISGERRREEREDAKYLRMERRMGKFMRKFVLPDNADVDKVAAVCRDGVLTVTVEKLPPPEPKKPKTIEIKVA

SEQ ID NO: 10579 - protein, 437 aa, Vibrio cholerae O1 biovar eltor str. N16961
MTLTRRQQIEALEKDWATNPRWKNVKRTYTAEEVVSLRGSVVPANTIAQRGADKLWELVNGSAKKGYVNCLGALTGGQAVQQAKAGIEAIYLSGWQVAADNNTAGTMYPDQSLYPVDSVPSVVRRINNAFRRADQIQWSNGKSPQDEGGIDYFLPIVADAEAGFGGVLNAYELMKSMIEAGAAGVHFEDQLASVKKCGHMGGKVLVPTQEAVQKLIAARLAADVAGTTTLVIARTDANAADLLTSDSDPYDADFVTGERTSEGFYRVRAGIDQAISRGLAYAPYADLVWCETAKPDLEEARKFAEAIHAQYPDQLLAYNCSPSFNWEKNLDAKTIAHFQQALSDMGYKYQFITLAGIHNMWFNMFELAHAYAQGEGMRHYVEMVQRREFEAASKGYTFVAHQQEVGTGYFDKMTNTIQGGNSSVTALTGSTEEDQFH

SEQ ID NO: 10580 - protein, 159 aa, Listeria monocytogenes EGD-e
MNVHDFSEKAMNGKEIALSDYKGKVLLIVNTASKCGLTPQLEGLEAMYKKLGGDNFEILGFPCNQFLRQDPGSDEEILEFCQMNYGVTFQMFSKIKVKGKDASPLYKYLTEQTGGKKVEWNFAKFLIDENGEVIERFPSKMKPEDFEDKVEALVAKVNN

SEQ ID NO: 10581 - protein, 46 aa, Aeromonas salmonicida
EKGFGFISPADGSKDVFVHFSAIQSTSFKTLDEGQRVEFTIEQGQK

SEQ ID NO: 10582 - protein, 243 aa, Gossypium hirsutum
MRQQYVFTTLTLLILFSLSCSTTLAQAPALAPAPSGPTNVTKILEKAGQFTLFIRLLKSTQVANQLLGQLNNSNNGMTVFAPTDNAFSSLKSGTLNSLTDEQKVELVQFHIVPTYLTSSQFQTISNPLRTQAGDSGDGKFPLNITTSGNSVNITTGLTNTSVSGTIYTDGQLAVYQIDQVLQPLQIFAPRPPAPAPAPAKSKNKKATTVADSPDVTPADNSKAATLQNVGLFGVAALVIALSL

SEQ ID NO: 10583 - protein, 360 aa, Synechococcus elongatus PCC 6301
MAVRKLGVLTSGGDCPGLNAVIRAIARHAVGNYGWELWGIAYATQGLLKRQAIALSPHHFDRQSLDPLLCSGGTILGSINRGDTLAHQAEILAGYQELGLDALIGIGGDGSLAILRQLAEAGRWQFIGIPKTIDNDVALTERAIGFDTAIHTVAEALLSLGSTAASHDRIMIAEVMGRQSGHLALQGGIAGGADVILLPEIPYRLLELCHYLQQLRDRWQRRYAVIAIAEGTHHPPEVTQGPGSLGEQLVQAITAQDPTLDARVTVLGHVQRGGNPVASDRLLATQMGYAAVERLAAGASGEMMAWQGGRVVSVPLEAVCLQSPTLVDPHSPPVDTAAGLGIFLGDRSLTPWRGSACPTH

SEQ ID NO: 10584 - protein, 45 aa, Bacillus atrophaeus
KKGSGFIEREAGDDVFVHFSAIQGEGFKSLEEGESVSFDVEQGQR

SEQ ID NO: 10585 - protein, 40 aa, Brassica napus
  misc_feature (25)..(25): Xaa can be any naturally occurring amino acid
KLTAFVFARCVPHILITVNLIKDAXKFERGVEWPLALFGM

SEQ ID NO: 10586 - protein, 45 aa, Bacillus cereus
EKGFGFIEVEGGEDVFVHFSAIQGEGFKTLEEGQEVTFEVEQGNR

SEQ ID NO: 10587 - protein, 479 aa, Methanosarcina acetivorans C2A
MVAMKMQINGKAVEACGGEVFGIKNPATGELIEQVPRGTEEDVAVAVEAASSAFTGWASASPQQRGEVLYRAAEIVRQRKDELASLLTQEQGKPIVEARNEIEGFAHVLEYYCGLSGSQRGDFIPVPGNGYAFTVKKPLGVCAAIIPWNMPALIMGWKIAPVLISGNTLVLKPASNTPLTNLTLASIFVEAGLPAGVLNVVTGPGETVGESLVRSPEVRKISFTGEARTGKRVAELAACGMKRITLELGGSDPMLVCDDADLESAAAGALRGRFYNCGQTCTAVKRLYVFESVAEEFIKKLETGIKSLRLGNGMDKNISMGPLNNRTQWEYIKELAAEIEEKDAGRIITGGKVPEFKDSEKGYFFEPTLVSDVPGDSRLLKEEVFGPLLPVVTVKNLDEAIVGANSTCYGLGASIWTKNIDRARKGCEQLNAGIIWINQHLKVAPEVPFGGVKESGFGRENGPESLSEYLETKTIMLKI

SEQ ID NO: 10588 - protein, 375 aa, Triticum aestivum
MSRLLSPSDQQLQSPQQQFPEEQSYPQQPYPQQAFPIPQQYSPHQPQQPFPQPQRPTPLQSQQPFPQQPKQPQQSFSQPQQQFPLQPQQPFPQPQQPIPQQPRQPFPEQPQRPQQPQQSFPQPQQQFPLQPQQPFPQPQQPQQPFPQQPQRPQQSFPQQPEQIIPQQPQQPFPLQPQQQFPEQSEQIISQQRQQPFSLQPQQPFSQPQQPLSQQPGQIIPQQPQQPSPLQPQQPFPQQPEQIIPQQPQQPFLLQSQQPFHQQPEQIISQQPQQPFSLQPQQPFSQPQQPFPQQPGQIIPQQPQQPFPLQPQQPFPQQPQQPFPLQPQQSFPQQPQQPFPQPQQAFPEQGEQIIPQQPQQPFPLQPHQPQQPYPQQ

SEQ ID NO: 10589 - protein, 45 aa, Bacillus subtilis
EKGFGFIEVEGQDDVFVHFSAIQGEGFKTLEEGQAVSFEIVEGNR

SEQ ID NO: 10590 - protein, 324 aa, Aspergillus nidulans FGSC A4
MSSSLEQLKATGTVVVCDSGDFATIDKYKPQDATTNPSLILAASKKPEYASLIDAAVEKGKKQGGSVDDQVDATLDYLLVEFGKKILDIIPGKVSTEVDARFSFDTKASVDKALHIIKLYEEAGISKDRILIKIASTWEGIQAAHILQSQHGINCNLTLMFSLVQAIAAAEAGAFLISPFVGRILDWYKAAHKRDFSKEEDPGVKSVQSIFNYYKKFGYKTIVMGASFRNVGEITELAGCDYLTISPGLLEELYNSKDAVPKKLDAASATTLDITKRSYLNDEALFRFDFNEEAMAVEKLREGISKFAADAVTLKDILKQKVQA

SEQ ID NO: 10591 - protein, 82 aa, Glycine max
  misc_feature (14)..(14): Xaa can be any naturally occurring amino acid
ARDAIGVTSLYIGXGLYGSVWISSEMKGLHDDCGYFEVFLPGHLYSSKQIGCRRLYNPPWFSEAIPSALYEPLVSRHPFEQA

SEQ ID NO: 10592 - protein, 497 aa, Streptomyces avermitilis MA-4680
MHDFSRRGLLRATAAAGAGAVVLPGITAAEAPGASAATGTAESVKCKPAKLTGRIVRPDDPGYADASLGWDELFVHYPLVIVYAQETQDVVNALTWARQHDVALRVRSGGHSLEGWSNVDNGIVIDVSELKWAHIDTASRIATVGAGLSQLEAVTALAEKDLAVTTGTEGTVGLSGATLGGGFGFLTRYLGMACDSLIGAEVVVASGAECAKVIKADGKNNADLLWALRGAGNGNFGIVTSLTYKVAPLKSVAYLQATWDGLGDLQGVFDTWQRTAPVADNRLGTQLEIHRGEILLFGVLAEGSEAEAEELLAPILSVGNPQVSVQVGNWGDVYAGFQIPTADEPANWKFFSQFTTEPFPEKAISLIASFMQDAPSDDSNFFTQAFGGAVRRSPRGGTAFPHRDALFYSEPGAGWGTRGQAGSGDEITPQAQAWIAEFSQALRPYVNGAYVNVPNIGMQDWETAYWGSNFDRLRKIKAKYDPRNVFQYEQSIPPASC

SEQ ID NO: 10593 - protein, 180 aa, Pseudomonas aeruginosa UCBPP-PA14
MLLSALALAGLPLSGWAADCPELLQGQLTKLRSKESIDLCQRYAGKPLVVVNTASHCGFTPQFKGLEALYQRYKGQGLEVLGVPSDDFKQEAADTAETAKICYGNYGVTFAMTQPQHVRGDEAIPLFRQLAEQSGQAPRWNFYKYVVDRQGRVVAQFSSKTTPDDPQLQAAIEKAIASQP

SEQ ID NO: 10594 - protein, 253 aa, Brassica napus
  misc_feature (155)..(155): Xaa can be any naturally occurring amino acid
  misc_feature (192)..(193): Xaa can be any naturally occurring amino acid
  misc_feature (197)..(197): Xaa can be any naturally occurring amino acid
METLNPLSHVPISDHRFVGQDMMSLQSPSSIWTKEENKMFERALAIYPEDSPDRWFKIASMIPGKTVFDVMKQYSKLEEDVFDIEEGRVPIPGYPSPLGLAQDTYRKRPNGARGSDHDRKKGVPWTEEEHRRFLLGLLKYGKGDWRNISRNFVVXKTPTQVASHAQKYYQRQLSGAKDKRRPSIHDITTGNXXNANXNRSFSDHRDILPDLVFIEKDNAEGLMCMSPNLFSPSSAPFDDAFNFAGVNAFSAGA

SEQ ID NO: 10595 - protein, 437 aa, Glycine max
MEPPLQQKSPQPPPRTATILGKYQLTRFLGRGSFAKVYQGRSLVDGSAVAVKIIDKSKTVDAGMEPRIIREIDAMRRLHHHPNILKIHEVLATKTKIHLVVELAAGGELFAKISRRGKLPESTARRYFQQLVSALRFCHRNGVAHRDLKPQNLLLDGDGNLKVSDFGLSALPEQLKNGLLHTACGTPAYTAPEILRRSGGYDGSKADAWSCGLILFVFLAGHLPFDDTNIPAMCKKISRRDYQFPEWISKPARFVIHKLLDPNPETRISLESLFGNAWFKKSLNPETAEENALGLSYVKSSYNYEGSKKSSGVTAFDIISMSSGLDLTRLFETTSDLGSKREKRFSSSARVEVVEEKVKEVGGVLGFKIEVGKSNGAIALVKGKVALVFEVLEIVPHELLFVAVKVVEGALEFEEHHWGDWKDALQDLVLSWHNQES

SEQ ID NO: 10596 - protein, 1033 aa, Aspergillus nidulans FGSC A4
MDYRALWRRDGAEEFLKLIQDPFKSAFQTNAVWASLATSAVVAIVLALLFSLFRPRHTLVYAPKVKHADRKHAPPPVGKGLFAWIKPVIRTKEAELVDCVGLDATIFIRFTKMCRNIFIFLSIIGCGVMIPVNLTQSQNTDGATAFVVMTPLYVKVNAIWSQVVCAWAFNIIITFFLWRNYKAVLALRRRYFESSDYQRSLHARTLMITDIPPDLRTDEGFLRLTDELNPTAALPRSSVGRNVKGLPKLIKEHEELVRKLESVLAKYLKNPDRLPPSRPTMRPPRGHRDEDGSGKVDAIDYLTDRIQRLEEEIRHVRASIDKRNAMPYGFVSWDKIEHAHAVAYVARNKHPRGTTIRLATRPHDLIWENLSLSKSARKWKAFVMFLWVTALTVVWIAPNALIAVFLSNLSNLGSVWPAFQTELDRNRKVWAAVQGILSPAVTSLFYLLLPIIFRRLSARTGDATKTLREQHVLRHLYSFFVFNNLIVFSLFSAVWTFIAAVIDLKNKNEDPWQAVQDGQFYIKAFSAMCNVSPFWVTYLLQRNMGAAIDLVQFVHLIWVWFAKTFLAPTPRQTIEWTAPPAFDYASYYNYFLYYSTIAICFATLQPIVLPVTALYFGLDAMMKKYMLMYIFVTKNESGGQFWRVLFNRVVFAAILSNVIIGLVAKARGTWNMVYCVVPLPFLMLLFKWYCMRTFDDDCTYYNKANLSDTEALAASKSSKSAGDRLSSKFGHPALFKPLITPMVHAKAADALKQIYRGRLGGNEAEGDYSDIVMDPMMKSQPGKTMPDTSAPFEVVPEHHLDFAYYKDRADFQEEFGGGIYGRPEDLMTERSHTPRSALGDWSPTSSRAPSPAPSVPSLPMLQPEAYDPRLNQGMHPVFRPPPFRTGSGMSRGLYQHQNESETELLGQVQQPAGVSMQPWRPGGGYGPVDQDDHAFTSYEQYLVSIVPENYTLAVRQQPQAPGACLPITGLGRSLFPDNTRTTDSRSLGSPSATVARPELYDAVAISNSRCLYKPALCKLNQQPIRRCLVQHLN

SEQ ID NO: 10597 - protein, 298 aa, Triticum aestivum
  misc_feature (261)..(261): Xaa can be any naturally occurring amino acid
  misc_feature (264)..(264): Xaa can be any naturally occurring amino acid
MADDGLDRWRGFFQGAGVGICEAIEKAILVAAADEPQEFLRRRDRIAERLFNALLARPSCHGCTASTGSVPPATPAVAEDKGSVRRVPEKESKVDSSSLGAPGGGALGGGISEDEDSDSEDDERLRRAAASNYGHNYDDDNDVEEEQDAAAPAEEDHHAEDDDPEAEELEALTNEIDEESQIVGEVLRIKELLLHKQDHSDATLFDSLRRLQLMQLSVSTLKATEIGRAVNGLRKHSSQQIRHLALALIQDWKILVDEWVXTTXLPAKIPGLTLCVIDKKKPPPPWVGLLAQNAKLFF

SEQ ID NO: 10598 - protein, 1424 aa, Magnaporthe grisea 70-15
MGASDSKLVFKKGIFRLSEERHIPADDSYWTSFWELPESSEDVFSLFAPADIRRTRDNALENLETLILAITSRLFTLRHHPSFPDAEIAPDREALNCIRVLTRILPYLYELESLQAWEDRFFWGTRRKRTRRAKLASEVLFDGSQPTSPTTTDGGFDDGGGNGGGNGDNKKPKAAGDDGYEDARPLGAELIDTLIDLLFLTEFTVPRQAVPAGAAAAGRPKVSYAIWQSGVGCNQTTQTTREFESNRTEILRLLLTLCSQSMYMSANVLPQRGVKALTHICTCPDKQVVLSMLCSLLNTLLLVVILYPVPDNANGQAQKNYYRHFLGRIHRPQDFQFIVDGMTRILNQPMQANPTSYIPGAVAQSSAATVKFAPETIMLFWETTQCNKRFRSFIIDTQRAHDFVISVLFYAIEFKGDSSRQGVVRMCAFLLQTLSMEKNFGINLNKSFEAQDTLPPAIRIPAFRGTYADFLIQSIYNLITTSKGKLSAIYPVLLAVINNIAPYLQGINATTSSRLLQLFASMSSPSFLLANESNHDLLRSLLEAMNTIIEHQYKKYQQPNYNAFQGIFNQPGAPAGNEEDNTFAIGDDDDSDDEARPTPAQSDVPSRSSSVASTTNRRGIPQSVDGDAEDALPTQLRGMSEKARGKMPAGYSFSRQNSTTSLGGSSVAGSAAGMAASASSPFLSGGPGGYFEPTAQWIDSWLPELPLHTLLTLIQQLTALLPRQVLAPEASAATDPRGHEQVLSRIRSTELVGIDTDAAHPRVHLFEWSQLALGWYESLVWSFVFSAELQAARGTAGIWNGTAIRLFRVVQDAQAPQGPSLSSPRGAVDAVGSNLVSRIGAINLRGAAESLGRASAGGNAGGGASEGAARRGSVERFFGDVFDIMEAWYSCALLKPPLLRNTWPRTCYGGAQVTATGLTVQAPESCNRHLKTSGVIMRATCESIAQGTILHRLNGDHTASVGCTGNRLCEAAFCSQPSQRIVPTTCASLYAVLAEPPSTPSQFGTFSFVVAQDLEATVGNCPAMLQSAMATMILEASYKCLSVKETANALPSKSDECTCISCHFAAAARFNPAALSTQKEPARRTSSPRQASLESQIREFLHAKKPREQGAGKEPLEQLQAAQAAAAAAALVAQPSAQPVAMHLGMFEIGKPLGRGKFGRVYLAREREHGFVCALKVLHKRELQDAHVERQVQREIEIQSNLRHPNILKMYGHFHDSKRIFIILEFAGKGELYKHLRKETRFPEWRAAQCIAQMASALRYLHRKHVMHRDIKPENILVGFYGEIKISDFGWSVHAPSDRRTTFCGTLDYLPPEMIKPRTADKSYDHRVDLWALGVLTYELLVGEAPFEDTPAMTHKKITRRDMKVPSFVSREASDLILKLLVVDPNKRLPLDKVLDHPWIVKHCRNQKASDRLLPSTGNTPPED

SEQ ID NO: 10599 - protein, 580 aa, Glycine max
MATPNPTRFSLAMERTGQWVFSPEIPTDVIVAVGQTNFSLHKFILAAKSNYVRKVIMESEESDLTRIEISDIPGGSEAFEKAAKFCYGVNFEITVHNVAALHCAAVFLQMTDEYCDGNLAGRTEDFLSQVGLSTLHSAVAVLKSCQKILPFAAEVNVVDRCVEVISCKACNEANFPSQSPPNWWTEELAVLDVDSFAKVIAAMKQRGAKYLTVAGALITYTERALRELVRDHSGGGRGIRSPESGDSDSESKRSEQRELLQAIVPLFPTEKAAFPINFLCCLLRCAIYLRASSACKRELEKRVTEILEHVTVDDLLVLTFSYDGERLLDLDSVRRIISGFVEREKGTTVFNAGVNFNEDFSAAMQRVAKTVDSYLAEIAAYAELSISKFNGIAILIPKGARKSDDDLYRAVDIYLKVHPNLDEIEKEKVCSVLDTLKLSYEARVHASKNKRLPLQIVLHALYYDQLQIRSGTAADKQAVVAAAEKKQLQADVSLVRENEELRSELMKMKMFISDLQKNVHGTSSSGRENIGPTKKPTFFSSMSKKLSKLNPFKNGSKDTSHIDDAPVDLTKPRKRRFSIS

SEQ ID NO: 10600 - protein, 385 aa, Bacillus halodurans C-125
MIRIFQTVLLAIVSAIVGFMIISITFVEYWSHTEAGKVPPKTAVLLHAIHHNLVTPDMRPPKFLTQSNGHSRFKTELIQIPVSDGASIPARVYQPKASGPHPIILYYHGGAFLEGYGDINTHDNIVRALAVRTGSIVVAVGYRVAPGHPFPTAIEDSYDALDWISKNAELFNGDPANVAVVGDSAGGNIATVVSLMARDREGPEISAQVLLYPLTTFQDVAFPSRDHYDSGYYLLSRAVMVQAREKYTPQQESWLNPYTSPLNADLEGVPPAFVVTAEFDPLRDEGEMYAQSLADAGVPVQAIRYNGVMHGFVSFYEVMERGDDALHQASMFLKKSFYDDMDAKPYELVIDDVPSAQVAIKDRLEAYAIGGFLIGKQSLSLFSGW

SEQ ID NO: 10601 - protein, 417 aa, Photorhabdus luminescens subsp. laumondii TTO1
MESKVVIPAEGKKITVDAKGKLVVPNNPVIPYIEGDGIGVDVTPAMLKVVDAAVQKAYQGERKISWMEIYTGEKSTHVYGKDVWLPDETLDLIREYRVAIKGPLTTPVGGGIRSLNVALRQQLDLYVCLRPVRYYQGTPSPVKQPELTDMVIFRENAEDIYAGIEWKAGSVEADKVIKFLQEEMGVNKIRFPQQCGIGVKPCSEEGTKRLVRAAIEYAIDNDRESVTLVHKGNIMKFTEGAFKDWGYQLAREEFGGELLDGGPWVKIKNPKNGKEIIVKDVIADAFLQQILLRPAEYDVIACMNLNGDYISDALAAQVGGIGIAPGANIGDECALFEATHGTAPKYAGQDKVNPGSVILSAEMMLRHMGWTEAADLIVKGMEGAIAAKTVTYDFERLMEGAKLLKCSEFGDAIIQHM

SEQ ID NO: 10602 - protein, 156 aa, Glycine max
  misc_feature (134)..(134): Xaa can be any naturally occurring amino acid
MGRGKIAIRRIDNSTSRQVTFSKRRNGLLKKARELSILCDAEVGLMVFSSTGKLYDYASTSMKAVIERYNKLKEEPHHLMNPASEAKFWQTEAASLRQQLQYLQECHRQLMGEELMGLGIKELQSLENQLEMSXKGVRMINDQIVTNEIEELRLNG

SEQ ID NO: 10603 - protein, 45 aa, Bacillus subtilis
EKGFGFIEVEGQDDVFVHFSAIQGEGFKTLEEGQSVSFEIVEGNR

SEQ ID NO: 10604 - protein, 448 aa, Thermoplasma acidophilum DSM 1728
MIMEDQERTERYNEDALRYSEYFKGKIQTISKVPVRSLDDFSIWYTPGVAAVSRKIASDPDLSFELTGRWNSIAILTDGTRVLGLGNIGPEAAMPVMEGKALIFNYLGGVNAIPIPIRVQSKEEFVKVAKALEPSFGGINLEDIESPKCFFLLETLQNEMNIPVWHDDQLGTASITLAGVINSLRIVGKKIDQVKVVFNGAGAANIAAAYLFKAAGFKMKNMILVDSKGILHPEREDIDALMINNPWKYQLAIETNGERVKGDLSNAIEGADLLISAAKSGPDTIDSRIVKKMNNDAIVFVLANPIPEMWPQEAKENGARIVATGRGDFPNQINNSLVFPGVFRGVLDARAKGVNFDVMVAASYEIANFVEDPTEEKIVPTMEEWELYPRLASAVASKTVELGLARKSDSKEGFYRRAREIIESNRNIYSKLMDLGLIKRMPNGEHKN

SEQ ID NO: 10605 - protein, 189 aa, Azorhizobium caulinodans
VYPKNDLDYASNFLNMCFAVPCEDYKVSPTLARALDKIFILHADHEQNASTSTVRLAGSSGANPFACIAAGIACLWGPAHGGANEAALKMLTEIGTPDRIPEFVNKAKDKNDPFRLMGFGHRVYKNYDPRAKIMQQTCHEVLTELGIKDDPLLDVAVELERVALHDEYFIEKKLYPNIDFYSGITLKAM

SEQ ID NO: 10606 - protein, 381 aa, Arabidopsis thaliana
MDRISGLPDELLLRVLSLLPNVKDVVVTMVLSKRWQFLWMMVPKLVYDDSYQNLEYGKFSRFVDRSLFMRKAPGIETLHFKLGQNCGNGDIQWWIRAASKFCFRELIIEINCSTSASPSILPRSLYTECRMLVTLKLKKAVLVDVSSPTCFPSLKNLSLVSVKYPGNEFVKSLLSSCHVLEDLVVEQCINDNVTIFSVKVPSLKSLVLRTSKERAPDGESGFVVEAPSLEYLDIDQTGGFCVIENGMPNLAEAYVSVLHHHPDMYPIRCVFHRLVHITLCTCDDEWLNLLACLLKGSPKLISLKLEKHHGHLICSPSPLRDDLSSVPECVLSSLETVEWVDYEGTEAERQLVEFILRNGSCLKKFVISPESVNPDKKYEMI

SEQ ID NO: 10607 - protein, 429 aa, Sinorhizobium meliloti
MSEKSATVTFGGKSADLPVRSGSIGPDVVDIGSLYKQTTMFTYDPGFTSTASCESKITYIDGDEGVLLHRGFPIEQLAEHGDFLEVCYLLLYGELPTKAQKADFDYRVTHHTMVHEQMSRFFTGFRRDAHPMAVMCGCVGALSAFYHDSTDITDPHQRMVASLRMIAKMPTIAAMAYKYHIGQPFVYPKNDLDYASNFLRMCFAVPCEDYVVNPVLARAMDRIFILHANHEQNASTSTVRLAGSSGANPFACIAAGIACLWGPAHGGANEAALNMLAEIGTADRIPEYIAKAKDKNDPFRLMGFGHRVYKNYDPRAKIMQKTTHEVLAELGHKDDPLLEVAMELERIALTDEYFVEKKLYPNIDFYSGITLKALGFPTTMFTVLFALARTVGWIAQWNEMIEDPEQRIGRPRQLYVGAPLRDYVPITKR

SEQ ID NO: 10608 - protein, 116 aa, Pinus pinaster
TVFTVILYGSPLSVIRLVIHTKSVEFMPSFYFSLFAFLGSVLWMVYGALSGDILIMAPNFVGIPLGLSQMALYCIYWNNSPVRVEATKLEAGGELKSIEQNIKEDIELYTEDIEKA

SEQ ID NO: 10609 - protein, 189 aa, Mesorhizobium huakuii
IYPKNDLGFAANFLHMCFAVPCEEYKINPVLARAMERIFILHADHEQNASTSTVRLAGSSGANPFACIAAGIACLWGPAHGGANEAALNMPGEIGHVDHIPEFIARAKDKNDPFRLMGFGHRVYKNYDPRAKIMQKTAHEVLGELGIKDDPLLDIAMELEKIALTDPYFIEKKLYPNVDFYSGITLKAL

SEQ ID NO: 10610 - protein, 71 aa, Triticum aestivum
MAHAAAAAAVPLRRPLLLYLRPARLLSSVAPRSMYGRAYTRALRPLAPLPSDDEDPDDGDGAPSRNEKKRK

SEQ ID NO: 10611 - protein, 171 aa, Hyacinthus orientalis
MKGTYQCSHSELSWSNVGEYQQQLVGHGELLLLRLHRHRVPATFSLSNVGTFIQMRTNLKVVDNSGAKRVMCIQSLKGKKGARLGDTIIASVKEAQPKGKVKKGDVVYGVVVRAAMPRGRCDGSEIKFDDNAVVLVNKQGEPIGTRVFGPVPHELRKKKHVKILTLAEHIA

SEQ ID NO: 10612 - protein, 334 aa, Pantoea agglomerans
NGIAGSYAEYVPVVHIVGAPRLTSQRKGELLHHTLGDGEFCHFMRMSAPVSVAQASLTPENALAEIDRVIEEVMYSSRPGYLLLPSDVPALPVSTRAHALPARQPPFSPSSLEAFTAAAQTQLRGANRVSLLADFLADRFKVKKALEQWMEEVPLGTSTLLMGKGLFNEQQAHFAGTYSGAASAPSTKEAIEGADVVITVGVKFTDTITAGFYQQRPSGNASTSALFAARAIRSSITGRSKNGQRDAPPPPLNLAFRPGRLILLNTTHCRWSRDNSLGQYAFWQQIQDSLQPGDVLVAEQGTACFAAAALNLPQDLQFVVQPLWGSIGYTLAAA

SEQ ID NO: 10613 - protein, 448 aa, Zea mays
MERARARAPALALAPVEVPKFFVCPISLEVMRDPVTLSSGITYDRDSIERWLFTDGHGDCPVTKLPLGADDLEPTPNHTLRRLIQSWCAAHAVERFPTPRPPVDADRVAAIVGCAKKGGQQEVLAALRELADIIGESDRNRRCVEGVPEAVEFLVSVVKKHAAGTSSSKPLGGCRSQEEPMCGVPDSPKACSPEEAALSILHSLKLSEASLKRALESSDGFVDTLASVLRWPPNYRARTYAMHLLKAALSAMQPSQLSSASTDLVEGVVRVVADRTLSPKAIKVALHVLCRLCPWGRNRVKAVEAGAVAAVVELLLNEGCGCGGSNGKRAVELAVVAIDHLCGCAEGRLELVAHPAGLAVVARAATRLSPTATESAVRALHAVARHSATPAVLQEMLAVGVVARLLYLVQAGASGERPRERAREMLKMHARVWRGSPCLASHMASYPC

SEQ ID NO: 10614 - protein, 235 aa, Zea mays
  misc_feature (138)..(138): Xaa can be any naturally occurring amino acid
SAGKFRKGSTGSEQAIRRRRQWQQQGASPVLLLLLTVQLSLLFRLPDSPSTLALALAAEPEQQNAKQHRQPALLVQSTCNSTSFYDLCIAALAADPASSTADVPGLGAIAVSAAANNASGTAAFLGNASDAAATPQAXRALLRACAGKYAAARDALVQARASLAEQAYDYAFVHVSAAGEYPAVCRTLFRRRQQQQRGASRSAYPAELAKREEALRRLCTIALDIISLLQNQETY

SEQ ID NO: 10615 - protein, 145 aa, Triticum aestivum
  misc_feature (15)..(15): Xaa can be any naturally occurring amino acid
  misc_feature (89)..(89): Xaa can be any naturally occurring amino acid
MASSMISSPAVTTVXNRAGAGMVAPFTGLKSMAGFPTRKTNNDITSIASNGGRVQCMQVWPPVGKKKFETLSYLPDLDDAQLAKEVEYXLRKGWIPCLEFELEHGFVYREHNRSPGYYDGRYWTMWKLPMFGCTDASQVLKELQE

SEQ ID NO: 10616 - protein, 333 aa, Methanocaldococcus jannaschii DSM 2661
MHKICVIEGDGIGKEVVPATIQVLEATGLPFEFVYAEAGDEVYKRTGKALPEETIETALDCDAVLFGAAGETAADVIVKLRHILDTYANIRPVKAYKGVKCLRPDIDYVIVRENTEGLYKGIEAEIDEGITIATRVITEKACERIFRFAFNLARERKKMGKEGKVTCAHKANVLKLTDGLFKKIFYKVAEEYDDIKAEDYYIDAMNMYIITKPQVFDVVVTSNLFGDILSDGAAGTVGGLGLAPSANIGDEHGLFEPVHGSAPDIAGKKIANPTATILSAVLMLRYLGEYEAADKVEKALEEVLALGLTTPDLGGNLNTFEMAEEVAKRVREE

SEQ ID NO: 10617 - protein, 404 aa, Prunus persica
YQGVYPVKCNQDRFVVEDIVRFGSPFRFGLEAGSKPELLLAMSCLCKGNPEALLICNGFKDFEYISLALFARKLALNTVIVLEQEEELDVVIDLSKKLGVRPVIGARAKLKTKHSGHFGSTSGEKGKFGLTTTQILRVVKKLDQLGLLDCFQLLHFHIGSQIPSTALLADGVSEAAQIYCELVRLGAHMKFIDIGGGLGIDYDGSKSSDSEISVSYSLEEYAAAVVRAVLNVCDRKSVKHPVICSESGRALVSHHSVMIFEAISSSACDDVPPMSAFALQYFIEGLTEEARADYRNLSAAAIRGEYEACLTYADQLKQRCIDQFKEGSLGIEQLATVDGLCDMVSKAIGASDPVRTYHVNLSVFTSIPDFWGIGQTFPIVPIHRLDQRPAVRGILSDLTCDSDG

SEQ ID NO: 10618 - protein, 367 aa, Caulobacter crescentus CB15
MKSLFQRRASKVRETEAMNAPVPNNQKAELLQKVVEHVDITSYDARPIIDSMRKMSFSSRDTARAADIFNMALADKGCSTWLILAGSTSAGGCMHVYRDMVKNGMIDAVVATGASIVDMDFFEALGFKHYQAAGPVDDNVLRDNYIDRIYDTYIDEEELQACDHTILEICNKLEPRGYSSREFIWEMGKWLAEGNAKKEGSLIQTAYEEGVPIFCPAFVDSSAGFGLVKHQKEKIAEKKPYLMIDAVADFRELTDVKIAAGTTGLFMVGGGVPKNFAQDTVVCAEILGVEADMHKYAIQITVADVRDGACSSSTLKEAASWGKVSTTYEQMVFAEATTVVPLIASDAYWRKAWEGREKPRWNKLFGK

SEQ ID NO: 10619 - protein, 73 aa, Glycine max
MLCTANNNDSTFKRVLKECAESYKYARDALHAPAQDSANDAYDYASMHMIVAYEYSNVWHSLFKLYSGVGDPC

SEQ ID NO: 10620 - protein, 158 aa, Ustilago maydis 521
MVSLTTSDNEQFTVDRDVAERSVLIKQMLEDIGDTEQPIPLVNVSSNVLKKVLEYCSHHRNDPPAPADDAEESRRRTTDISDWDAKFIQVDQEMLFEIILAANYLDIKPLLDVGCKTVANMIKGKTTEEIRKLFNIQNDFSPEEEAQIRKENEWAEDR

SEQ ID NO: 10621 - protein, 519 aa, Zea mays
SARGNYGLEAGSKPELLIAMSCLPVTEAEPKPYLICNGYKDADYIALALSARAMGLNPIIVLEMEEELAIVLDQYRKLQQKLPDDDAVRKKFEPIIGIRAKLLTKLPGHFGSTAGKHGKFGMLADQIYEVAETLGKEGKLHWLQLLHFHIGSMIPTTGKVYDAVSEAAGIYCNLVNEHGAKWLATLDCGGGLGVDYDGTRSGDSDMSVAYGIQEYASAVVQAVRLKCDYNGVAHPVVCTESGRAMASHHSMIILETLSAIPEPQDEDTSEQLLNRIQDLSYKQPRAPVGGATAAVYSHAADLKKHGIEMYKLGKKLGKRVVADANTVYNYHMNLSVFSLLPDFWGIGQLFPMMPVSRLNEEPTLKGTLVDITCDSDGKIENFISRENTLPLHLFEPSLGGYYVAVLVSGAYQEAIAGKHNLFSGPTLVRVNSSTTKDGGFEIERVDLGPAADEIIGSMRYSVEEDIITVIEKKAKGTEEEERVWAWEMVEPLMTKALTTMPYLNEYKVPEPEPEPEPIP

SEQ ID NO: 10622 - protein, 426 aa, Thermus aquaticus
MAYQRIQIPQEGEKITIQEGVLKVPDQPIIGFIEGDGTGPDIWRAAQPVLDAAVAKAYGGQRRIVWVELYAGEKANQVYGEPIWLPEETLEFIREYLVAIKGPLTTPVGGGIRSINVALRQELDLYACVRPVRWFQGVPSPVKHPELVNMVIFRENTEDIYAGIEWPAGSEEVKKVLDFLKREFPKAYAKIRFPETSGLGLKPISKEGTERLVEAAIEYAIKEDLPSVTLVHKGNIMKFTEGAFREWGYALAREKYGATPLDGGPWHVLKNPRTGREIVIKDMIADNFLQQILLRPDEYSVIATMNLNGDYISDALAAQVGGIGIAPGANINYKTGHAVFEATHGTAPKYAGQDKVNPSSVILSGEMMLRYLGWNEAADLIIRAMERTISKGLVTYDFHRLLVAEGKPATLLKTSEFGQALIQHMD

SEQ ID NO: 10623 - protein, 238 aa, Avena sativa
IENKISRQVTFAKRRNGLLKKAYELSLLCDAEDALIIFSGRGRLFEFSSSSCMYKTLERYRTCNYNSQEAAPLVENEINYREYLKLKTRVEFLQSSQRNILGEDLGPLSMKELDQIESQIDVSLKHIRSRKNQVLLDQLFDLKSKEQELQDQNKDLRKKLQEMSCGENAVHMSWQDGGGQSSSSGQAVDPYPGPLQHPEHDSSMQIGYHQTYMEQLBNEDHTASHHPNAQPGSSAGWI

SEQ ID NO: 10624 - protein, 332 aa, Gonyaulax polyedra
MAGPQLDDFTLVKVLGKGSYGKVMLVRGAQDNRLYAMKMLRKENVIKRNQVEHTKTERSVLETVSHPFIVTLHYAFQTPKKLYMVMEYCPGGELFFHLSRAGRFSEGRTRFYVAETSSAVAYLHQLNVIYRDLKPENLLIDGEGHAKITDFGLRKEGIQDNHSAMTMCGTPEYLAPEILDKKGHGKAVDWYSVGALTYEMLTGLPPFYTKDLQKLFDRIRRGELTYPDYVSVLAKEFLRALLQRNPDARLAGGVPGGDEVKGHEFFGGLDWVALEKRAIPPPFKPTFGGQKEDDVVKYFEKDFVGQPVVNSEVGEGGRDLGHLEASTLTGKR

SEQ ID NO: 10625 - protein, 445 aa, Bacillus halodurans C-125
MAKDESYLIKPLLDRNYPCVSYGKGAALYDMDGKRYLDACSGAVTASIGHGVDEVVQAMYEQARKVSFVYRSQFTNEPAERLAMKLAEQLPGQLNHSFFVNSGSEATETAIKISIQYWQERGRPEKTLILSRWMSYHGITQGALSLSGHYERRQRFEGMLDRLPFLSPPYPYRQVREMSGVDYAEELDHLIEQIGPHRIAAFIAEPIVGAAGTALVPGEWYYEALKQVLDQHDILFICDEVMTGMGRTGKDLAIEHWDATPDIVTLGKGLSAGYAPLAATVVADHVLEPIQAGSNLIMSGHTFSANPLSCAAGLAVLHYVKKHDLVKRAATIGEKLIEDLQEIQTASAIVGDVRGKGLLIGLEFVKNKATKAPFPKDAQVAAVIVNEAQRQGLLLYPSAAGLKGEGAGCLIAPPFTLTKEERCELLGKLARTLERVEKQLLGAEK

SEQ ID NO: 10626 - protein, 251 aa, Oryza sativa (japonica cultivar-group)
MGSKSYPTVSDEYLAAVGKAKRKLRGLIAEKNCAPLMLRLAWHSAGTFDVSSRTGGPFGTMKNPGEQSHAANAGLDIAVRLLDPIKDQLPILSYADFYQLAGVVAVEVTGGPEVPFHPGRQDKPEPPPEGRLPDATQGSDHLRQVFSAQMGLSDKDIVALSGGHTLGRCHKERSGFEGAWTSNPLIFDNSYFTELVSGEKEGLLQLPSDKALMADPAFRPLVEKYAADEDAFFADYAEAHLKLSELGFAEE

SEQ ID NO: 10627 - protein, 222 aa, Chasmanthium latifolium
IENKISRQVTFAKRRNGLLKKAYELSLLCDAEVALIIFSGRGRLFEFSSSSCMYKTLERYRSSNYNSQEVKAPLDSEINYQEYLKLRTRVEFLQTTQRNILGEDLGPLSMKELEQLENQIEISLKHIRTRKSQVLLDQLFDLKTKEQELEDISKGLRKKLHETSGENALHISWEEGGHSGASGNAVEPYQGFQQHRENESSLQIGYRQQAYMEQLNNEDMED

SEQ ID NO: 10628 - protein, 342 aa, Streptomyces coelicolor A3(2)
MKALVKENAEPGLWLADVPEPTIGSGDVLIKVLRTGICGTDLHIRAWDGWAQQAIRTPLVVGHEFVGEVVDTGRDVTDIKAGDRVSGEGHLVCGKCRNCLAGRRHLCRATVGLGVGRDGAFAEYVALPASNVWVHRVPVDLDVAAIFDPFGNAVHTALSFPLVGEDVLITGAGPIGLMAAAVARHAGARNVVITDVSEERLELARKVGATLALNVSDATIADGQRELGLREGFDIGLEMSGRPEAMRDMIANMTHGGRIAMLGLPAEEFPVDWARVVTSMITVKGIYGREMFETWYAMSVLLEGGLDLAPVITGRYSHRDFEAAFADAASGRGGKVILDWTA

SEQ ID NO: 10629 - protein, 225 aa, Danthonia spicata
IENKISRQVTFAKRRNGLLKKAYELSLLCDAEVALIIFSGRGRLFEFSSSSCMYKTLERYRTCNFNSQEAKAPLDSEINYQEYLKLKTRVEFLQTTQRNILGEDLGPLSSKELEQLENQIEISLKHIRTRKNQALLDQLFDLKSKEQELQDLNKDLRKKLQETSGENAVHISWEEGGHSGASGNAMEPSQGFLQHPENDSDLHMGYHQQAYMDHLNNEDMAAPHH

SEQ ID NO: 10630 - protein, 281 aa, Pyrococcus furiosus DSM 3638
MERAFIEWYPRGYGVAFKIKKKIYEKLSKYQKIEVYETEGFGRLLALDGTVQLVTLGERSYHEPLVHPAMLAHPKPKRVLVIGGGDGGTVREVLQHDVDEVIMVEIDEDVIMVSKDLIKIDNGLLEAMLNGKHEKAKLTIGDGFEFIKNNRGFDVIIADSTDPVGPAKVLFSEEFYRYVYDALNNPGIYVTQAGSVYLFTDELISAYKEMKKVFDRVYYYSFPVIGYASPWAFLVGVKGDIDFTKIDRERAKKLQLEYYDPLMHETLFQMPKYIRETLQRL

SEQ ID NO: 10631 - protein, 73 aa, Triticum aestivum
MAFPACVQFGTRENPCRCKFIGPTLGFVAFLVTGVIEWPVGAVVYLFRHRKGRRIMGHPSRVVYPRVSRAIPI

SEQ ID NO: 10632 - protein, 225 aa, Ehrharta erecta
IENKISRQVTFAKRRNGLLKKAYELSLLCDAEVALIIFSGRGRLFEFSSSSCMYKTLERYRSCNYNSQEAAPENEINYQEYLKLKTRVEFLRTTQRNILGEDLGPLSMKELEQLENQIVVSLKQIRDKKNQALLDQLFELKSKEQELRDLNKDLRKKLQETTGDNVLHMSWQDGGGQHSGSSGLTAEHHQGLLHHQDQGNHSLQIGYHQAYMDHLNNEAEMAGHN

SEQ ID NO: 10633 - protein, 166 aa, Brassica napus
  misc_feature (11)..(11): Xaa can be any naturally occurring amino acid
  misc_feature (19)..(19): Xaa can be any naturally occurring amino acid
  misc_feature (21)..(21): Xaa can be any naturally occurring amino acid
  misc_feature (31)..(31): Xaa can be any naturally occurring amino acid
  misc_feature (36)..(36): Xaa can be any naturally occurring amino acid
  misc_feature (39)..(40): Xaa can be any naturally occurring amino acid
  misc_feature (42)..(42): Xaa can be any naturally occurring amino acid
  misc_feature (45)..(45): Xaa can be any naturally occurring amino acid
  misc_feature (48)..(48): Xaa can be any naturally occurring amino acid
  misc_feature (51)..(51): Xaa can be any naturally occurring amino acid
  misc_feature (55)..(55): Xaa can be any naturally occurring amino acid
  misc_feature (60)..(60): Xaa can be any naturally occurring amino acid
  misc_feature (63)..(63): Xaa can be any naturally occurring amino acid
  misc_feature (67)..(69): Xaa can be any naturally occurring amino acid
  misc_feature (75)..(76): Xaa can be any naturally occurring amino acid
  misc_feature (88)..(89): Xaa can be any naturally occurring amino acid
  misc_feature (91)..(93): Xaa can be any naturally occurring amino acid
  misc_feature (95)..(96): Xaa can be any naturally occurring amino acid
  misc_feature (100)..(102): Xaa can be any naturally occurring amino acid
  misc_feature (105)..(107): Xaa can be any naturally occurring amino acid
  misc_feature (115)..(115): Xaa can be any naturally occurring amino acid
  misc_feature (119)..(120): Xaa can be any naturally occurring amino acid
  misc_feature (139)..(139): Xaa can be any naturally occurring amino acid
  misc_feature (147)..(148): Xaa can be any naturally occurring amino acid
  misc_feature (151)..(151): Xaa can be any naturally occurring amino acid
  misc_feature (153)..(153): Xaa can be any naturally occurring amino acid
  misc_feature (155)..(156): Xaa can be any naturally occurring amino acid
  misc_feature (159)..(163): Xaa can be any naturally occurring amino acid
SEKKKKKKSVXASSMLSSXAXVTSPAHATMXAPFTXLKXXAXFPXTRXANXDITXIASNXGRXSCMXXXPPVGKXXVETLSYLPDLTXXEXXXEXXYLLXXXWIXXXEVELEHGXVYRXXGSTPVYYDGRYWTMWKLPXFGCTDSAXXLKXAXNXXGEXXXXXRDI

SEQ ID NO: 10634 - protein, 451 aa, Zea mays
MVGGGGGGPLRRVGKYEVGRTIEEGTFAKVKFAQNTETGESVAMKVLDRSSILKNKMAEQIKREISIMKLVRHPNVVRLHEVLASRKKIFIILEFITGGELFDKIIRHGRLSEADARRYFQQLIDGVDFCHKKGVYHRDLKPENLLLDSQGNLKISDFGLSAWPAQGSFLLRTTCGTPNYVAPEVLSHKGYNGALADTWSCGVILYVLLAGYLPFDEVDLTTLYGKIESAEYSFPAWFSGGAKSLIRRILDPNPETRIRIEEIRSDEWFQKNYEPIKEIENEEVNLDDVNAAFDDPEDDNEDAFEDETGPLTLNAFDLIILSQGLNLAALFDRRQDCDKLQNRFLSRNPAKVILSSMEVVAQSMGFKTHIRNYKMRVEGLNADKTSHLSVMVEVFEVAPSIFMVELQRAAGDTSEYNTFVNNYCSKLDDIIWKFPTEKGKSRIPRLSKSHS

SEQ ID NO: 10635 - protein, 280 aa, Thermus thermophilus
MAAKKDYYAILGVPRNATQEEIKRAYKRLARQYHPDVNKSPEAEEKFKEINEAYAVLSDPEKRRIYDTYGTTEAPPPPPPGGYDFSGFDVEDFSEFFQELFGPGLFGGFGRRSRKGRDLRAELPLTLEKAFHGGERVVEVAGRRVSVRIPPGVREGSVIRVPGMGGQGNPPGDLLLVVRLLPHPVFRLEGQDLYATLDVPAPIAVVGGKVRAMTLEGPVEVAVPPRTQAGRKLRLKGKGFPGPAGRGDLYLEVRITIPERLTPEEEALWKKLAEAYYARA

SEQ ID NO: 10636 - protein, 229 aa, Eleusine coracana
LENKISRQVTFAKRRNGLLKKAYELSLLCDAEVALIIFSAGRGRLFEFSSSSCMYKTLERYRTCNFNSHEVKAPLDSKINYQDYLKLKTRVEFLQTTQRNILGEDLGPLSNKELEQLEKQIEISLTQIRSRKNQMLLVQLLDLKSKEQELQDLNKDLRKKCQLKKTCGENATHISWEEGGHSGTSRNANEPNQGFLQHAENNYSSLQIGYYQQAYMDQLNNQDIGAAHN

SEQ ID NO: 10637 - protein, 391 aa, Streptococcus salivarius
MAEKIVMKNGQLQVSDRPIIPFIEGDGVGHDIWKNAQAIFDKAVEVAYEGKRHIEWQELLAGKKAYDKTGEWLPKETLEAIRESLVAIKGPLETPVGGGIRSLNVALRQELDLYACVRPVRYFDGVASPLKEPEKTNITIFRENTEDIYAGIEWEAGTADVKRVIEFLQTEMNVNKIRFPESSSIGIKPISIEGSKRLIRSAIDYALKNNLKKVTLVHKGNIQKFTEGGFRKWGYEVAQEDYKEELLAGRLEINDIIADNFLQQILLNPEKFDVVALTNLNGDYASDALAAQVGGIGISPGANINYQTGHAIFEATHGTAPDIADQDKANPCSVLLSGCMLLDYIGWTEAAQLITSAIEKTFKADIFTADLAFGKQAYSTSAFSNQILSIM

SEQ ID NO: 10638 - protein, 45 aa, Enterococcus faecalis
EKGFGFISREDGSDVFVHFSAIQGDGFKTLEEGQAVTFDVEDSDR

SEQ ID NO: 10639 - protein, 191 aa, Methanococcoides burtonii DSM 6242
MRTLMKIVALTTMILTIAVSGCATTDTDEPEPIPEIIEDENNVPEQEIFLISTSAFENNGEIPSRYTCDGDNINPELVPGSLPEDTVSLVLIVDDPDAPIGTFTHWIVWNIAPGSIIEENTVPGIQGLNGAKGTDYLGPCPPSGTHRYFFRFYALDTMLDIGSGSTRTTLEEAMQEHIIAEGELMGTYSSD

SEQ ID NO: 10640 - protein, 341 aa, Streptomyces coelicolor A3(2)
MRIGVLTAGGDCPGLNAVIRSVVHRAVDNYGDEVIGFEDGYAGLLDGRYRALDLNAVSGILARGGTILGSSRLERDRLREACENAGDMIQNFGIDALIPIGGEGTLTAARMLSDAGLPVVGVPKTIDNDISSTDRTFGFDTAVGVATEAMDRLKTTAESHQRVMVVEVMGRHAGWIALESGMAAGAHGICLPERPFDPADLVKMVEERFSRGKKFAVVCVAEGAHPAEGSMDYGKGAIDKFGHERFQGIGTALAFELERRLGKEAKPVILGHVQRGGVPTAYDRVLATRFGWHAVEAAHRGDFGRMTALRGTDVVMVPLAEAVTELKTVPKDRMDEAESVF

SEQ ID NO: 10641 - protein, 46 aa, Klebsiella pneumoniae
SKGFGFISPKDGSKDVFVHFSAIQSDSFKTLNEGQEVSFTIENGAK

SEQ ID NO: 10642 - protein, 289 aa, Triticum aestivum
MAMSDLAAAVISKANGGVDGEEPVEIREVWADNLEAEFALIRDVVDEFPFVAMDTEFPGIVCRPVGAFRSPADYNYATLKANVDMLHLIQLGLTFSGPTGELPALGAGRRRCVWQFNFREFDDERDIFATDSIELLRHSGIDFRRNAERGVDARRFAELLMSSGVVLNDAVYWVTFHAGYDFGYLLKILTCNSLPDTQAGFFKLMKIYFPTVYDIKHLMKFCNSLHGGLNKLAELLDVERVGESHQAGSDSLVTSCAFWKLKDSFFAGSTEKYAGVLYGLNAENGVSAH

SEQ ID NO: 10643 - protein, 126 aa, Triticum aestivum
MSATCAADLGPLLGAAAANATDYLCNRFADTTSAVDSTYLLFSAYLVFAMQLGFAMLCAGSVRAKNTMNIMLTNVLDAAAGALFYYLFGFAFAFGTPSNGFIGKHFFGLKDMPQTGFDYSFFLFQW

SEQ ID NO: 10644 - protein, 45 aa, Lactobacillus casei
DKGYGFITGEDGQDVFVHFSAINGEGYKSLDEGQAVSYDVEQSDR

SEQ ID NO: 10645 - protein, 45 aa, Listeria grayi
EKGFGFISREDGSDVFVHFSAIQGDGFKTLEEGQAVTFDVEESDR

SEQ ID NO: 10646 - protein, 45 aa, Listeria innocua
EKGFGFIERENGDDVFVHFSAIQGDGFKSLDEGQAVTFDVEEGQR

SEQ ID NO: 10647 - protein, 181 aa, Glycine max
MAYSMLSSAAVVTSPAQATMVAPFTGLKSSSAFPVTRKANNDITSIVSNGGRVSCMKVWPPVGKKKFETLSYLPDLTEVELGKEVDYLLRNKWIPCVEFELEHGFVYREHGSTPGYYDGRYWTMWKLPLFGCTDSAQVLKEVQECKTEYPNAFIRIIGFDNNRQVQCISFIAYKPPSFTGA

SEQ ID NO: 10648 - protein, 135 aa, Triticum aestivum
  misc_feature (34)..(34): Xaa can be any naturally occurring amino acid
  misc_feature (64)..(64): Xaa can be any naturally occurring amino acid
  misc_feature (72)..(72): Xaa can be any naturally occurring amino acid
  misc_feature (100)..(100): Xaa can be any naturally occurring amino acid
  misc_feature (113)..(113): Xaa can be any naturally occurring amino acid
  misc_feature (121)..(121): Xaa can be any naturally occurring amino acid
MSDSEDHHFESKADAGASKTYPMQAGAIRKGGFXVIKNRPCKVVEVSTSKTGKHGHAKCHFVAXDIFNGKKXEDIVPSSHNWDVPQCWTVLEYQLIDISXEDGFVSFLTDNGXTLRDDLKXQTDDAILDQLKGRF

SEQ ID NO: 10649 - protein, 293 aa, Schizosaccharomyces pombe
MPFIKAVKSSPYFSRYQTKYRRREGKIDYYARKRLIAQAKNKYNAPKYRLVVRFSNRFVTCQIVSSRVNGDYVLAHAHSSELPRYGIKWGLANWTAAYATGLLVARRALAKVGLADKYEGVTEPEGEFELTEAIEDGPRPFKVFLDVGLKRTSTGSRVFGAMKGASDGGLFIPHSPNRFPGFDIETEELDDETLRKYIYGGHVAEYMEMLIDDDEERYQKQSSGLIADGIESDQLEDIYAEAYAKIREDPSFQKSGKDAAAFKAESLKHTQRKLTAEERKERFNAKVIEAGRA

SEQ ID NO: 10650 - protein, 112 aa, Prunus persica
KVLVIGGGDGGVLREVARYSSIEQIDICEIDKMVVDVSKQFFPAVAVGYEDPRVKLHVGDGVAFLKAVPAGTYDAVIVDSSDPIGPAQELLEKPFFQTVANALRPGGVVTTQ

SEQ ID NO: 10651 - protein, 163 aa, Triticum aestivum
  misc_feature (114)..(114): Xaa can be any naturally occurring amino acid
MEGRMFGLETPLMTALQHLLDVPDSESGGAGNAGGERQGPTRAYVRDARAMAATPADVKELPGAYAFVVDMPGLGSGDIKVQVEDERALVISGERRREEKEDARYLRMERRMGXKLMRKFVLPENADMEKISAVCRDGVLTVTVEKLPPPEPKKPKTIQVQVA

SEQ ID NO: 10652 - protein, 143 aa, Cichorium intybus
MAREKIKIRKIDNITARQVTFSKRRRGLLKKAEELAVLCDADVALVIFSATGKLFEYASSSMQELLGKYKLHSTNNVNKVDEPSLDLQLVESQESRMSQEVLEKDRELSQLRGEDLQGLTLEELQRLESLLEGRLNRVAPDKG

SEQ ID NO: 10653 - protein, 392 aa, Zea mays
  misc_feature (141)..(141): Xaa can be any naturally occurring amino acid
  misc_feature (175)..(175): Xaa can be any naturally occurring amino acid
  misc_feature (192)..(192): Xaa can be any naturally occurring amino acid
MLVCMYFPLPAPHEVARAPRGALRLARPVSSLVAAASARGVPDLACVPPAPGRRPGPASGIAATVRHVFSLGEGSPLTVAARGHGHSLMGQSQAAQGIVVRMESLRGARLQVHDGFVDAPGGELWINVLRETLKHAWHPSXTDYLHLTVGGTLSNAGVSGQAFRHGPQVSNVNQXEIVTGLKRTLKAFNQKXTELLSRLRIINRTGVLNNWRASFKPQDPVEASHFQSDGRVLYCLELTKNFNSDDTDTMEQVNLEFLDRVHTSELKLRAQGLWEVPHPWLNLLIPRSSIRRFAKEVFGKILVGFLSSAPSLSGYGSIAHSMNLNKQIVEFCEEAGIGMKQYLAPYTTQQQWKAHFGARWETFERRKHRYDPLAILAPGQRIFPKASLPLPL

SEQ ID NO: 10654 - protein, 103 aa, Prunus persica
ECAYQEMIALLPLCSIPSPKTVLVVGGGDGGVLREVSRHPSVEHIDICEIDKMVVDVSKKFFPQLAVGFQDPRVHLHIGDATEFLRHAPKGKYDAVIVDSSDP

SEQ ID NO: 10655 - protein, 198 aa, Zea mays
MDLSNISIQWFRIHPKESNKEIISGATRPVYALEPHDVGRYLQAEIDVGGEIAVAKTAGPVDPDAGLVDYVETLVRKPETEFNVVVLQSNGVDQPKESVHVLNVGRLRMRLTKGKSVVAKEFYSSSMQLCGVRGGGEAASQAMFWRPRNDLSLVLAFESTRERNAAIMLARRFAVDCNVCAFTKRYIILAGPGDKTPW

SEQ ID NO: 10656 - protein, 319 aa, Geobacter sulfurreducens PCA
MKKIGILTSGGDCSGMNAAIRAAVRTAIRMNIEVVGFRKGYLGLMKGDAIPLDTKAVSGILHRGGTFLQSARSPEFKTPEGQRTALNNLKALGVEGMVVMGGDGSLTGALALNRLGLPVVGIPASIDNDIPFTDMALGVDTALNNIIYAVDCIKDTASSHARAFVIEVMGRHSGYLASISAIATGAEYALVPEREYDLAEICQQLRARYEEGRDNAIIILAEGAGHGHEIANSIKDAIGFETRVTVLGHYQRGGAPTVFDRLLASRLGKKSVELLVTGTWGVMVGLSCNAILATPLEDVIKGEKRPQDEVLRLAEVLGV

SEQ ID NO: 10657 - protein, 482 aa, Ustilago maydis 521
MTVGVASKLLDAPFSHVINGKSVDTQGFKTLDVIDPATEKAIAQVPIATKETVDQAVDAAHAAFPSWSKTTWDERAKLLEQYGEEYKAMLPELVKLLTAEQGKSIQFAQHECETILPWFTELAKVRLDEKVVHENDTHKAIERYVPLGVCAGIVPWNFPVLLMLWKVTQAIVTGNCIIIKPSPFTPLCDIRIIEAAQKVFPPGVVQIVVGDDNLGPWITEHPRIQKISFTGSTATGKLVAKSCSATLKRFTLELGGNDPLVVLPQQKDLAATAQNVLLAAFFNSGQVCIAAKRIYIHEDIYDEFKATLAQVVQHFKVGPGNEEGVMFGPINNKMQYNKVGEFFEEAKKNNFNLVAGGQVEEKPGFFYPLTIVDNPPENSRLVQEEPFGPIVPLLKWKDEADLVKRINDSQWGLGASVWSSDIQAAERIGRQIESGTIWINCLVHHHPAVPFGGFKSSGIGAEHGKNGLGAYCQVQALWIPKA

SEQ ID NO: 10658 - protein, 357 aa, Neurospora crassa
MAARTLKIGLIPGDGIGKEVIPAGRRILEALPASLGLKFEFIDLKAGWETFEQTGNALPEETVSILKSECDGALFGAVSSPTKAVKGYSSPIVALRKKLDLYANVRPVKSVRGPGVKPIDMVIVRENTEDLYVKEEKTYDTPEGKVAEAIKRISQRASSRIATIAGEIALRRQKIREGGSPSIHKGPLVTVTHKSNVLSQTDGLFRSTAREALAAGRFTSVAVEEQIVDSMVYKLFRQPEAYDVIVAPNLYGDILSDGAAALVGSLGLVPSANVGEGFAIGEPCHGSAPDIQGQNIANPIATLRSAALMLEFLNEEEAAAKIYAAVDANLEEGKLLSPDLGGKAKTEEVVQDILRRL

SEQ ID NO: 10659 - protein, 485 aa, Magnetospirillum magnetotacticum MS-1
MTDLDASLLKTHAYIDGHWAEADDGRRFDVLDPATGHLLASVPDMGGAETRRAIEAAEMAWGPWRRRTAKERAAILMAWFEQIIAHKDALARLLSAEQGKPLPEAQGEIVYGAAFIQWFAEEGKRAYGDLIPTTASDRRLLVMKQPIGVVAAVTPWNFPMAMITRKCAPALAAGCPVVVKPAEDTPLSALVLAELAERAGLPRGVFNIVTTRQPGAVGGEMTANPLVRKLSFTGSTRVGKMLMAQCAETVKKVSLELGGNAPFIVFDDCDLDAAVAGALASKYRNSGQTCICTNRFLVQAGVYEEFGRKLAEKAAAMVVGHALKGPVQQGPLINAAAVAKVASHVADAVSKGARVLTGGRPHELGGGFWQPTVLADVTAQMLCFQEETFGPVAPLVRFETEEEAVELANASQFGLAGYFYSRDLARVFRVAEAMECGMVGVNESLISNEVAPFGGIKESGLGREGSKYGLDDFMETKYVCIGGLS

SEQ ID NO: 10660 - protein, 101 aa, Escherichia coli
MRGSHHHHGSRLQSGKMTGIVKWFNADKGFGFITPDDGSKDVFVHFSAGSSGAAVRGNPQQGDRVEGKIKSITDFGIFIGLDGGIDGLVHLSDISWAQAEA

SEQ ID NO: 10661 - protein, 111 aa, Bartonella sp. pb18975nm
ANEACLKMLQEIGSVKRIPEFIARAKDKNDPFRLMGFGHRVYKNYDPRAKIMQKTCHEVLKELNIQDDPLLDIAIELEKIALNDEYFVEKKLYPNVDFYSWHYEMFTVLFA

SEQ ID NO: 10662 - protein, 382 aa, Saccharomyces cerevisiae
MRALAYFKKGDIHFTNDIPRPEIQTDDEVIIDVSWCGICGSDLHEYLDGPIFMPKDGECHKLSNAALPLAMGHEMSGIVSKVGPKVTKVKVGDHVVVDAASSCADLHCWPHSKFYNSKPCDACQRGSENLCTHAGFVGLGVISGGFAEQVVVSQHHIIPVPKEIPLDVAALVEPLSVTWHAVKISGFKKGSSALVLGAGPIGLCTILVLKGMGASKIVVSEIAERRIEMAKKLGVEVFNPSKHGHKSIEILRGLTKSHDGFDYSYDCSGIQVTFETSLKALTFKGTATNIAVWGPKPVPFQPMDVTLQEKVMTGSIGYVVEAFEEVVRAIHNGDIAMEDCKQLITGKQRIEDGWEKGFQELMDHKESNVKILLTPNNHGEMK

SEQ ID NO: 10663 - protein, 83 aa, Triticum aestivum
MAGSLTVSGVLVWRRDVMTHSFGEGYSTRSDEEGFGGVYGQNDPVLNPGTEVHPDHPDYDKSQGSEVKEKEKARHLKDDKHAT

SEQ ID NO: 10664 - protein, 257 aa, Glycine max
MFSKLQPQHQQQHQPFQFSRECQTSEDDDSRSSGGPNTAVAQKSVLGGGGCSDGATIEVVRRPRGRPPGSKNRPKPPLIITREPEPAMSPFILEIPGGSDVVEALARFSRRKNTGLCVLTGSGTVANVTLRQPSFSPAGASVATVTFHGRFDILSMSATFLHHGSPAAIPNALAVSLSGPQGQIVGGLVAGRLLAAGTVFVIAASFNNPSYHRLSSEEDAQNTSDGGGDRQSPAESSMYSCHRPSDVIWAPTPRPPF

SEQ ID NO: 10665 - protein, 291 aa, Triticum aestivum
  misc_feature (162)..(162): Xaa can be any naturally occurring amino acid
MAGLSMEHPWAFAFGLLGNIISFSSLLAPIPTFYRIFKSKSTEGFQSVPYVVALFSAMLWIFYALVKTGEGLLITINAAGCVIETIYIVMYLVYAPRKAKIFTAKIVLLLNIAGFGLIFLLTVFAFQGETRVISLGWICVGFSVCVFVAPLSIIGRVIKTKXSVEYMPFTLSLTLTLSAIVWFLYGLLIKDKYVALPNILGFTFGVIQMVLYVFYMNKTPVASEVKEGKEAWKVPAEDHVVVINVGKADKSSCAEVRPVTEMAGAVDVPRRCAAEAAAAPGMDFARSVDVV

SEQ ID NO: 10666 - protein, 380 aa, Acremonium chrysogenum
MTTTYKILVLPGDHIGPEIMAEAIKVLTTIETHRPNLHFNLTTDLVGGTSIDTHGVPITQSVLDAAKASDAVLFGSIGGPEWAGVHPTPESGLLQLRQHLDAFANLRPCEFLVPSLVGASPIREHVVKGTRFIVVRENCGGAYFGEKKEEEDVASDLWVYTRPEIERLARVSAAVARIMGRSEDDNQAATVWSADKANVLASGRLWRRITSDIFAKEFPDITLQHQLADSMAMLMVRDPRRFNGVIHTDNTFGDILSDISGAITGTLGLMPSASLCGVPGEGHRSNGIYEPVHGSAPDISGKGLANPVAQILSVAMMLRYSMGLEKEATAVERAVVKVLDAKSEGGLEIRTGDLGGRATCSQVGDAVCEVLGPLLQGKKA

SEQ ID NO: 10667 - protein, 222 aa, Panicum miliaceum
IENKISRQGTFAKRRNGLLKKAYELSLLCDAEVALIIFSGRGRLFEFSSSSCMYKTLERYRSSNYSSQEVKTPLDGEINYQDYLKLKTRVEFLQTTQRNILGEDLGPLSMKELEQLENQVEISLKHIRTRKNQMLLDHLFDLKSKEQELQDLNKDLRKKLQETNAENVLHVSWEEGGHSGASGNAIEPYQGFLQHPENDPSLQIGYHQQAYMDQLNNEDMAD

SEQ ID NO: 10668 - protein, 184 aa, Cucumis sativus
VSRSLSTALLADGVGEAAQIYCELVRLGANMRVIDIGGGLGIDYDGSKSSDSELSVAYGLEEYAAAVVDAVRCVCDCRSVKHPIICSESGRAIVSRHSVLIFEAVSASSYEVPSMSSLELQYLVDGLTDEARVDYQNLSAAAYMGEYKTCLVYADQLKQRCVEKFKDGCLGMEQLAAVEGIARQ

SEQ ID NO: 10669 - protein, 246 aa, Glycine max
MGKSYPTVSADYQKAVEKAKKKLRGFIAEKRCAPLMLRLAWHSAGTYDVSSKTGGPFGTIKHPSELAHGANNILDIAVRLLEPLKAEFPILSYADFYQLAGVVAVEVTGGPEVPFHPGREDKPEPPPEGRLPDATKGSDHLRDVFGKAMGLSDRDIVALSGGHTIGAAHKERSGFEGPWTSNPLIFDNSYFKELLSGEKEGLLQLPSDKALLSDPVFRPLVEKYASDEDAFFADYAEAHQKLSELG

SEQ ID NO: 10670 - protein, 222 aa, Pennisetum glaucum
IENKISRQVTFAKRRNGLLKKAYELSLLCDAEVALIIFSGRGRLFEFSSSSCMYKTLERYRSSNYGSQEVKTPSDGEINYQDYLELKTRVEFLQTTQRNILGEDLGPLSMKELEQVENQIEISLKHIKDKKNQMLLNQLFDLKSKEQELQDLNKDLRKKLQETNAESVLHLSWEEGGHSGTGGNAIEPYQGFLQHPENDPSLQIGYHQQAYIDQLNNEDMAD

SEQ ID NO: 10671 - protein, 222 aa, Setaria italica
IENKISRQVTFAERRNGLLKKAYELSLLCDAEVALIIFSGRGRLFEFSSSSCMYKTLERYRSSNYGSQEIKTPLDGEINYQDYLKLKTRVEFLQTTQRNILGEDLGPLSMKELEQLENQIEIFLKHIRTRKNQMLLDQLFDLKSKEQELQDLNKDLRKKLQETNAESVLHVSWEEGGHSGTSGNAIEPYQGFLQHPDNDPSLQIGYHQQAYMDQLNNEDMGD

SEQ ID NO: 10672 - protein, 337 aa, Vibrio cholerae O1 biovar eltor str. N16961
MFNQYHKLPLFLYTVLCVRLSSRALNTFEELNMTNYLERGIKELVEEFISSGKPCPSKQTISERRAGYLSSTVLAGSSPEMADEFVDELDGIQVKVYKPSDKIDLPITIYFHGGCFISGGFETHEAQLRQLAHLSETIVVCIKYRLAPEHAYPSAHDDVFQAALGIKEHGHKYGGDTEHVFFVGDSAGAQLALATALRLKNKKLWLPEKQILIYPMVDPLGVSDSYQKNGTDFIITAQMLLSGFQLYAGESERLASEKELNLLARKDLQGLPPTLIITAEYDPLRDEGEQLYRLLLSQGVDAYCERYLGVIHGFYQLSGVSESARRCIRNIANAIKN

SEQ ID NO: 10673 - protein, 483 aa, Tortula ruralis
MTGEVKEYRLLLASKPVEADREFLDVTNKYTGEVGAKVQLATHDDVDKAIDAAVAAAPAMAALGAFERKAILEKTVAELKKRAEEIAQILTMESGKPIKDARGEVARTIDTFQVAAEESVRIYGEHMPLDISARNKGPQGIVKKFPIGPVSMVSPWNFPLNLVAHKVAPALAVGCPFVLKPASRTPLSALILGDILVPDRGAAKGAFSVLPVSRADADMFTVDERFKLLTFTGSGPVGWDMKARAGKKKVVMELGGNAPCIVDDYVPDLDYTIQRLINGGFYQGGQSCIHMQRLYVHERLYDEVKAEFLAQVKKLKVGNPFEDDTFIGPMISEKDATRVEDWVKEAVEKGGKLLCGGSRKGAVMQPTVLEDVPMDAMARKEEIFGPVVLFYKYSDFKEAVKECNNTHYGLQSGIFTKDLNKAFYAFEHMEVGGVILNDSPALRVDSQPYGGLKDSGIQREGVKYAMEDYLETKVLVMRNVGVL

SEQ ID NO: 10674 - protein, 175 aa, Triticum aestivum
  misc_feature (63)..(63): Xaa can be any naturally occurring amino acid
MAPTVMATSVTSVAPFQGLKSTAGLPVSRRSSSAGLGSVSNGGRIRCMQVWPIEGIKKFETLXYLPPLSTEALLKQVEYLIRSKWVPCLEFSKVGFVFREHNSSPGYYDGRYWTMWKLPMCGCTDTTQVLKEVEDVKKEYPDAYVRVIGFDNLRQVQCVSFIAFRPPGCEESDKA

SEQ ID NO: 10675 - protein, 282 aa, Bacillus subtilis subsp. subtilis str. 168
MTIQWFPGHMAKARREVTEKLKLIDIVYELVDARIPMSSRNPMIEDILKNKPRIMLLNKADKADAAVTQQWKEHFENQGIRSLSINSVNGQGLNQIVPASKEILQEKFDRMRAKGVKPRAIRALIIGIPNVGKSTLINRLAKKNIAKTGDRPGITTSQQWVKVGKELELLDTPGILWPKFEDELVGLRLAVTGAIKDSIINLQDVAVFGLRFLEEHYPERLKERYGLDEIPEDIAELFDAIGEKRGCLMSGGLINYDKTTEVIIRDIRTEKFGRLSFEQPTM

SEQ ID NO: 10676 - protein, 46 aa, Photobacterium mandapamensis
EKGFGFLTQNNGGADVFVHFRAIASEGFKTLTEGQKVSFDVEQGQK

SEQ ID NO: 10677 - protein, 480 aa, Streptococcus pneumoniae TIGR4
MPIQNKTMLITYSDSLGNNLKDLYDNLEEHFGDAIGGVHLLPFFPSTVDRGFAPVDYDEVDSAFGDWEDVKRLGEKYYLMFDFMINHISRQSKYYKDYQEKHEASEFKALFLNWDKFWPENRPTQSDVDLIYKRKDRAPKQEIVFEDGSVEHLWNTFGEEQIDLDVTKEVTMEFIRKTIQHLASNGCDLIRLDAFAYAVKKLDTNDFFVEPDIWDLLDKVRDIAAEYGTELLPEIHEHYSIQFKIADHDYYVYDFALPMVTLYTLYSSRTERLAKWLKMSPMKQFTTLDTHDGIGVVDVKDILTDEEIDYASNELYKVGANVKRKYSSAEYNNLDIYQINSTYYSALGDDDVKYFLARLIQAFAPGIPQIYYVGLLAGKNDLKLLEETKEGRNINRHYYSNEEIAKEVQRPVVKALLNLFSFRNRSEAFDLEGTTEIETPTAHSIVIKRQNKDKSVTAVVEIDLQNQTYRVIENGVEVSF

SEQ ID NO: 10678 - protein, 45 aa, Pediococcus pentosaceus
EKGFGFIEVEGENDVFVHVSAINQDGYKSLEEGQSVEFEVVEGDR

SEQ ID NO: 10679 - protein, 466 aa, Synechococcus sp. WH 8102
MPIDSVTAALEALDHQDAGVRYHGAWWLGKNRSAEGVPRLVECLLDERDKTCTGGYPLRRQAARSLGMIKDSRCLPELLKTLETDDVQLHEATLRALIQIKSDQCSSSLINYLDRDIPNKPIEALIEALTEQRMWDVSEKIQPFLNDKSERIAGSAAAFFYSYTGEMTYLNKVISLLDHQNRFIRQSAAFDLARIGTIKATDPILTAKIPNNVKMFAIKAILNKSLSRSNQADSIPDTDLASIHSSLFKALDSLARDNFSGNLLIEQDNQIPETYPGDGSTESDLLSNAFDNLRSPSLTSRKSGIKQLVRGANRFKIDLLDLYFSESDQDITMGLIKAMAELKNPHYANALIDAIGVEIGNHCQGNIRRVAACALGDINWNAKISSQSLHAVFNKLKWTLHSPEDWGLRYSACLALEGIGNADSIKLLNEAKAKETDPVLSARLDKAILKSKNKTSIHHIENKKVL

SEQ ID NO: 10680 - protein, 168 aa, Glycine max
MIFSPSVTTVNRAGAGVVALFTGLMSMAGFPTENTNSDITYIASNCGRVQCVRVWPPFGKKKFETLFYLPDLDDAQLAREVIYLLRKGWIPCLEFELEHGFVYREHNRSPVLYYGLYWTMWKLSMCGCSDASHVLRDLLDAKSAYPCGFMRIIICHNVTQVHRISFIV

SEQ ID NO: 10681 - protein, 365 aa, Glycine max
  misc_feature (36)..(36): Xaa can be any naturally occurring amino acid
  misc_feature (122)..(122): Xaa can be any naturally occurring amino acid
MATTRSAPLLKHLLTRLNPSRSVTYMPRPGDGTPRXVTLIPGDGIGPLVTGAVEQVMEAMHAPLYFEKYEVHGDMKAVPAEVLESIRKNKVCLKGGLATPMGGGVNSLNVQLRKELDLYASXLVNCFNLPGLPTRHDNVDIVVIRENTEGEYSGLEHEVVPGVVESLKVITKFCSERIAKYAFEYAYLNNRKKVTAVHKANIMKLADGLFLESCREVATRYPGIKYNEIIVDNCCMQLVSKPEQFDVMVTPNLYGNLVANTAAGIAGGTGVMPGGNVGADHAVFEQGASAGNVGNDKVVEQQKANPVALLLSSAMMLRHLQFPAFADRLETAVKKVILEGKYRTKDLGGTSTTQEVVDAVIDALD

SEQ ID NO: 10682 - protein, 46 aa, Photobacterium phosphoreum
EKGFGFITQDNGGADVFVHFRAIASEGFKTLAEGQKVSFEVEQGQK

SEQ ID NO: 10683 - protein, 47 aa, Proteus vulgaris
DKGFGFITPKDGSKDDVFVHFSAIQSDSFKSLKEGQEVSFSIENGAK

SEQ ID NO: 10684 - protein, 169 aa, Streptomyces avermitilis MA-4680
MTTDNAATSVLDTEIDALQGGSADLSQYAGKAVLIVNVASKCGLTPQYAGLERLQERYAAQGFTVLGVPCNQFLGQEPGTSEEIAEFCSATYGVTFPLTEKVEVNGDARHALYESLVGFADGEGHTGDIRWNFEKFLIGRDGKVVARFSPQTEPESAEVVTAVERQLAG

SEQ ID NO: 10685 - protein, 361 aa, Triticum aestivum
LGCREAEEMGSTADEEACMFALQLGSSSILPMTLKNAIELGLLDTLVAADGKLLSPAEVAAKLPSTANPAAPDMVDRMLRLLASYKVVSCTVEEDKDGRLSRRYGAAPVCKFLTPNEEGVSMAPLALMNQDKVLMESWYYLKDAVLDGGIPFNKAYGMSAFEYHGTDPRFNRVFNEGMKNHSIIITKKLLELYKGFSGLGTLVDVGGGIGATVGAITAHYPTIKGINFDLHHVISEAPPFLGVTHIGGDMFQKIPSGDTILMKWILHDWSNEHCATLLKNCYDALPAHGKVMLVESILPVNPEATPEAQGGFHLDMIMLAHNPGGRERYEREFEALAKGAGFGAIKTTYIYANTWVIEFTK

SEQ ID NO: 10686 - protein, 90 aa, Brassica napus
  misc_feature (67)..(67): Xaa can be any naturally occurring amino acid
MCVVDQEVENRLALLVHITSLCFPLDTWRERRKMADEGMANCIDIILAIILPPLGVILKFACGIEFXICLLLTFFGYLPGIIYAVWVITK

SEQ ID NO: 10687 - protein, 238 aa, Glycine max
FIKCFVGSEEGTPDSVNPSVVDDDEEEGLPSPPLDEGAFFVTQAGSMELSQFFDGMDDDGNPRPTGPFSKNHENGRKPAFDSHVLEMRKLQPSHDTVVINRDVKSQQQAKENKAAVMPVRPNKPVTADSGPGRPPKSNVQRKSNMEPKMQQKMENNSITRRPPTAQLDKSKRSDDDAVQVKLEATKRKLQESYQQAEKAKRQRTIQVMEINDLPKQGLHRNTHFKPGYHSRHWANGRR

SEQ ID NO: 10688 - protein, 207 aa, Zea mays
LLPPYLPTTRLLLSSEPARSPAAAIPPTPPPSGRTGNLAMAAASSATSVHDFTVKDSSGKDVDLSVYKGKVLLIVNVASQCGLTNSNYTELSQLYPKYKDQGFEILAFPCNQFGGQEPGTNDEIVQFACTRFKAEYPIFDKVDVNGSNVSPLYKFLKSSKGGLFGDSIKWNFSKFLVDKEGHVVDRYAPTTSPLSIEKDIKKLLGSS

SEQ ID NO: 10689 - protein, 112 aa, Bartonella sp. sa18991nm
ANEACLKMLQEIGSIKRIPEFIARAKDKNDPFRLMGFGHRVYKNYDPRAKIMQKTCHEVLKELNIQNDPLLDIAIELEKIALNDEYFVEKKLYPNVDFYSGITLKALGFPTE

SEQ ID NO: 10690 - protein, 497 aa, Saccharomyces cerevisiae
MTLSKYSKPTLNDPNLFRESGYIDGKWVKGTDEVFEVVDPASGEIIARVPEQPVSVVEEAIDVAYETFKTYKNTTPRERAKWLRNMYNLMLENLDDLATIITLENGKALGEAKGEIKYAASYFEWYAEEAPRLYGATIQPLNPHNRVFTIRQPVGVCGIICPWNFPSAMITRKAAAALAVGCTVVIKPDSQTPLSALAMAYLAEKAGFPKGSFNVILSHANTPKLGKTLCESPKVKKVTFTGSTNVGKILMKQSSSTLKKLSFELGGNAPFIVFEDADLDQALEQAMACKFRGLGQTCVCANRLYVHSSIIDKFAKLLAERVKKFVIGHGLDPKTTHGCVINSSAIEKVERHKQDAIDKGAKVVLEGGRLTELGPNFYAPVILSHVPSTAIVSKEETFGPLCPIFSFDTMEEVVGYANDTEFGLAAYVFSKNVNTLYTVSEALETGMVSCNTGVFSDCSIPFGGVKESGFGREGSLYGIEDYTVLKTITIGNLPNSI

SEQ ID NO: 10691 - protein, 400 aa, Neurospora crassa
MLSRNSMVCLLILLLLLLSWLLRLARAVAQPTPRLARGFASVQDTPAQTLQSDIFKPTKYGGKYTVTLIPGDGIGAEVAESVKTVFKADNVPITWEQIEVSGVQDNASRTEEAFQQAVASLRRNKLGLKGILHTPISRSGHQSFNVAMRQELDIYASISLVKNLPGLQTRHKDVDLCIIRENTEGEYSGLEHQSVDGVVESLKIITRAKSERITKFAFQFALANQRKKVTCIHKANIMKLADGLFRGTFNRLAKDFPQLECNDMIVDNASMQCVSKPQQFDVMVMPNLYGGILSNIAAALVGGPGVVPGCNMGRDVAVFEPGCRHVGLDIQGKDQANPTALLLSGTMLLRHLGLDDHANRISNAVYDVIAQGKVRTRDMGGEASTHEFTRAILDSMEKSL

SEQ ID NO: 10692 - protein, 162 aa, Daucus carota
MDLRFMGIDHPLFDTLYHILDDDEHDTTDTGNTKRNKSRHERRYVRDAKAMATTAADVKEYPNAYLFVVDMPGLKSGDIKVQVEDGNVLVVNGERKREEEEGVKYLSMGRKVGRFLKKFVVPENANLENIKAVCQDGVLSVTVEKLPPPEPKKPKTIEVQIA

SEQ ID NO: 10693 - protein, 186 aa, Bdellovibrio bacteriovorus HD100
MIRCPLLSQNEISSHTHAAPLRRFPMKKHLYDFTVKAANGQPVSLDQYRDKVVLVVNVASKCGYTPQYKGLEELYQQNKDNGLVILGFPCNQFGAQEPGSNEEIQQFCELNYGVSFPVMGKVDVNGGNADPLYQWLKEEAPGLLGTEMIKWNFTKFLVGKDGAVLKRFAPKDEPKDIADDIKKALA

SEQ ID NO: 10694 - protein, 223 aa, Arabidopsis lyrata
MRIRRREEKENQEYKKGLWTVEEDNILMDYVLNHGTGQWNRIVRKTGLKRCGKSCRLRWMNYLSPNVNKGNFTEQEEDLIIRLHKLLGNRWSLIAKRVPGRTDNQVKNYWNTHLSKKLVGDYSSAVKTTGEDDDSLPSLFITAATTSCHHQQENVYENIAKRFDGVVSASYEDKPKQELAQNDVLMATTNDPSHYYGNNALWVHDDDFELSSLFTRNDEFCFW

SEQ ID NO: 10695 - protein, 271 aa, Triticum aestivum
MPSRPAPLVHRLRLLRSAVVSPSSALLPCSRPRLAIPFAQPPLRAAAFAAASSPLLRPVGARFSLFSSMAAAASSASSVHDFTVKVCLPHVAPAPSVISIRISHPSPCQFSVSAIALAHDASGKDVDLSTYKGKVLLIVNVASQCGLTNSNYTELAQLYEKYKDQGFEILAFPCNQFGGQEPGTNEEIVQFACTRFKAEYPIFDKVDVNGDNVAPVYKFLKSSKGSLFGDNIKWNFSKFLVDKEGRVVDRYAPTTSPLSIEKDIKKLLASS

SEQ ID NO: 10696 - protein, 364 aa, Arabidopsis thaliana
MGKGGMSQGEGSKVEEENMAAWLVGINTLKIQPFLLPSVGPHDVRVRMKAVGICGSDVHYLKTMRCADFVVKEPMVIGHECAGIIEEVGEEVKHLVVGDRVALEPGISCWRCNLCREGRYNLCPEMKFFATPPVHGSLANQVVHPADLCFKLPENVSLEEGAMCEPLSVGVHACRRAEVGPETNVLVMGAGPIGLVTMLAAQAFSVPRIVIVDVDENRLAVAKQLGADEIVQVTTNLEDVGSEVEQIQKAMGSNIDVTFDCAGFNKTMSTALAATRCGGKVCLVGMGHGIMTVPLTPAAAREVDVVGVFRYKNTWPLCLEFLTSGKIDVKPLITHRFGFSQKEVEDAFETSARGSNAIKVMFNL

SEQ ID NO: 10697 - protein, 187 aa, Candida albicans SC5314
MSDQIPVENQQVPSENSEEVKNKLEEMEQETAKLRELHSQLSSESTNGVTHPTDEEKRDTDARSIYIGNVDYGSTPLELQQHFSSAGVVNRVTILTNKFTGQPKGFAYLEFADTDAVNKAVATLDGSTFRERQLKVSAKRTNIPGISVKRGFPGRGRGNFRGGRGRGGRGGRGGFRGARGGPRFNPY

SEQ ID NO: 10698 - protein, 486 aa, Rhodobacter sphaeroides 2.4.1
MIEKRDFYINGGWTAPAEARDCEVIDPSTEEACAVISLGDQADTDAAVAAAKAAFEGWAATPPAERLRLVKGILAQYEARKEEMAQAISLEMGAPIDLARNSQAPCLPWHLTNFLKAFEEIEWVRPLGPHAPNDRIALEPIGVVGLITPWNWPMNQVTLKVIPALLAGCTCVLKPSEEAPLSSLLFAEFVHDAGLPAGVFNLVNGDGAGVGTQLSSHPDVEMISFTGSTRAGRAISKAAAESLKRVTLELGGKGANLIFADADERAVERGVKHCFNNSGQSCNAPTRMLVERPLYDRAVEIAAEVAAKTRVASAHEEGPHIGPVVNKRQFEQIQSYIQKGIDEGARLVAGGLGRPDGLNRGFFVRPTVFADVTPGMTIEREEIFGPVLSILPFETEEEAVRIANDTPYGLTNYVQSEDGARRNRLARRLRSGMVEMNGKSRGAGAPFGGVKASGRAREGGVWGIEEFLEVKAISGWDPEAEALAAE

SEQ ID NO: 10699 - protein, 112 aa, Bartonella sp. pm19058nm
ANEACLKMLQEIGSVKRIPEFIARAKDKNDPFRLMGFGHRVYKNYDPRAKIMQKTCHEVLKELNIQDNPLLDIAIELEKIALNDEYFVEKKLYPNVDFYSGITLKALGFPTE

SEQ ID NO: 10700 - protein, 81 aa, Zea mays
CLYVALQMSVQDANMSSDTDMSKVFEDRTFVSSILNSLPGVDPNDPSIKDLLASLHSQGEEEKKEDKLDKTEDEKNCFKLE

SEQ ID NO: 10701 - protein, 301 aa, Arabidopsis thaliana
MTEEFDTTGVCTGTWWSSSNGMFSGCSLPRSAEIVVDFGEIEWQNIDTLDAKTYNENYLSTSTFLGNANLDTTSQIYVSSPSNIHEEERYNQINSFLEGLFDSSEQLLVPNCPKPELFESFHFFDDVFPNESRMISVFDHQKPKEDMQACKSLTTCKRASEKSGELEDIESSQPLKRPRLETPSHFPSFKVRKEKLGDRITALQQLVSPFGKTDTASVLHDAIDYIKFLQEQITEKVSTSPHLNSIGSGEQKQWSDKSSNNTHNQNCSPRQDLRSRGLCLMPISSTFSTPPQHLDTSSLWN

SEQ ID NO: 10702 - protein, 253 aa, Oryza sativa (japonica cultivar-group)
MERTTTRRTSSKGAAAAPAPKVVAVLAGLLERAAARGDADADARGGSAAAAAATAFRGRTRPEISVRRYAERIYRYAGCSPACFVVARVYLDRLAGRSPEEESSPSPSPPATAAAAVCVDSYSVHRLLITSVMVAAKFMDDIHYNNAYFARVGGVEVAEMNGLELELLFALRFRLNVTPATFATYCAALEGEMAADDGPLPSPSPSPEEEGNDRRQPPPRRKDGITNKVAAAVDRSALLTAAHHRVVVVEITQ

SEQ ID NO: 10703 - protein, 357 aa, Colletotrichum lagenarium
MAEFIRAQIFGTTFEITSRYSDLQPVGMGAFGLVCSARDQLTNQNVAVKKIMKPFSTPVLAKRTYRELKLLKHLRHENVISLSDIFISPLEDIYFVTELLGTDLHRLLTSRPLEKQFIQYFLYQIMRGLKYVHSAGVVHRDLKPSNILVNENCDLKICDFGLARIQDPQMTGYVSTRYYRAPEIMLTWQKYDVEVDIWSAGCIFAEMLEGKPLFPGKDHVNQFSIITELLGTPPDDVINTIASENTLRFVKSLPKRERQPLKNKFKNADPSAIDLLERMLVFDPKKRITATEALSHDYLAPYHDPTDEPVAEEKFDWSFNDADLPVDTWKIMMYSEILDYHNVDASAQQIEEQFNGQ

SEQ ID NO: 10704 - protein, 272 aa, Lactococcus lactis subsp. cremoris
MKLNNQIEIPELGLGVFQIPNEETAEVVKNGIINGYRLIDTAKIYENEEGTGQGIKEGLASTGLTREDLFVTSKLWGDNHSYKETIQSFEESLKKLDLDYLDLYLIHWPGTNYAYKEAWKAMEDLYKAGKVKAIGVSNFQKHHLEELLSYAEINPVLNQIELHPKLSQKELREFLKLHDIKVQAWSPLMQGQLLDNEMLKKIADKHGKSVAQIILRWDIQQEILVNVKSIKSERMIANRQIFDFALDQEDMEALNSLNEALRVGPNPDTFNF

SEQ ID NO: 10705 - protein, 131 aa, Triticum aestivum
MSYYDRRGESSVLEAFTLSPLPYPVILILMMVTLLLGASWFFSYEEFMEEASEQFSWFLLGVPIALVLLIRWISSVDTFEGYFGFYPTESRWRGYPAAPSEGSSPWGVAMVVLLLLVLASFHSTFQDMWKA

SEQ ID NO: 10706 - protein, 278 aa, Zea mays
MASSSRSTVFSLLLLVALLLSCSGMSSAARLLEEAPPKEEHPHPAVPELPEPELPPHPTDVVPPELPKPELPPHPAVVPELPKPEVPHQVPEQPKPELPPHPTAVPELPKPEVPHPVPELPKPEVPPHPTAVPELPKPEVPHPVPELPKPELTPHPAAVPELPKPEVPHPVPELPKPELPPHPTAVPELPKPEVPHPVPELPKPELPPHPAVPELPKPEVPHPVAPELPKPELPPHPTVPELPHPEVPEVPNHELPPLPKAELPPKPEGHYPEPEAKP

SEQ ID NO: 10707 - protein, 512 aa, Zea mays
  misc_feature (89)..(89): Xaa can be any naturally occurring amino acid
  misc_feature (153)..(153): Xaa can be any naturally occurring amino acid
  misc_feature (207)..(207): Xaa can be any naturally occurring amino acid
  misc_feature (225)..(225): Xaa can be any naturally occurring amino acid
  misc_feature (255)..(255): Xaa can be any naturally occurring amino acid
  misc_feature (320)..(320): Xaa can be any naturally occurring amino acid
  misc_feature (348)..(348): Xaa can be any naturally occurring amino acid
  misc_feature (431)..(431): Xaa can be any naturally occurring amino acid
  misc_feature (447)..(447): Xaa can be any naturally occurring amino acid
MSSSPSFGLLALAAVLLALNLAQHGSLAATVGPRVIVVGAGMSGISAAKRLSEAGITDLLILEATDHIGGRMHKTNFAGINVELGANWXVEGVNGGKMNPIWPIVNSTLKLRNFRSDFDYLAQNVYKEDGGVYDEDYVQKRIELADSVEEMGXEKLSATLHASGRDDMSILAMQRLNEHQPNGPATPGGTWVVDYYKFDYEFAEPPXRVTSLQNTVPLATFSDFXGDDVYFVARPAGATRAVVYYLAGQYLKTRXDSLGKIVDPRLQLNKVVREIKYSPGGVTVKTEDNSVYSADYVMVSASLGVLQSDLIQFKPKLPVXTWKVRAIYQFDMAVYTKIFLKFPRKFWXPEGKGREFFLYASSRRGYYGVWQEFEKQYPDANVLLVTVTDEESRRIEQQSDEQTKAEIMQVLRKMFPGKDVPDATDILVPRXWWSDRFYKGTFSNWPXVGVNRYEYDQLRAPVGRVYFTGEHTSEHYNGYVHGAYLSGIDSAEILINCAQKKMCKYHVQGKYD

SEQ ID NO: 10708 - protein, 45 aa, Streptococcus dysgalactiae
EKGFGFISTENGQDVFAHFSAIQTNGFKTLEEGQKVEFDVEEGQR

SEQ ID NO: 10709 - protein, 503 aa, Ralstonia eutropha JMP134
MRDRTLVISVLIVASCGLGYELIAGALSSYLLGDSILQFSSIIGCYLFAMGVGSWLSRYVKDEDVLARFIDIEILVGLLGGISAALLFVVFAWLSAPFRTALYALVFLTGVLVGMEIPLVMRILNARRAAFSDLVSRVLTFDYLGALAVSLVFPLVLAPRLGLSRTGFLFGMLNAAVALYTTRLFRDELPQVPLRTMRALVVIALLGAGFAGSDRLTHWAERGLFGDEIIHSESTPYQRLVITRWKDDLRLYINGNLQFSSRDEHRYHEALVHPVMQALPWARRVLVIGGGDGLALREILRHRNIEHVTLVDLDPAMTTLFSQSAPLRALNRDSLRDARVTVFNADAAQWMEQNAEVFDAIIVDLPDPSNFGLGKLYSVPMYRLLSRHLAEKGYAVVQSTSPYYAPRSFWGIDATLHEAGLHTWPYHAYVPSFGEWGFILAGKRSDYTPPTRYDMPMKFLDADSTALMFRFPPDMAPRAGHANRLNEQSLVHDFEQDWGNVIR

SEQ ID NO: 10710 - protein, 177 aa, Arabidopsis thaliana
MSSNKIVLTSSDGESFQVEEVVARKLQIVKHLLEDDCVINEIPLQNVTGNILSIVLEYCKKHVDDVVDDDASEEPKKKKPDDEAKQNLDAWDAEFMKNIDMETIFKLILAANYLNVEGLLGLTCQTVADYIKDKTPEEVRELFNIENDFTHEEEEEAIRKENAWAFEADTKHEDPKP

SEQ ID NO: 10711 - protein, 431 aa, Zea mays
  misc_feature (141)..(141): Xaa can be any naturally occurring amino acid
  misc_feature (203)..(203): Xaa can be any naturally occurring amino acid
  misc_feature (247)..(247): Xaa can be any naturally occurring amino acid
  misc_feature (256)..(256): Xaa can be any naturally occurring amino acid
MAEKENILMQRYEMGKLLGKGSFAKVYHARNVKTSESVAIKVIDKDKIKKCGLMDQIIQEISVMKLVKHPNIVQLYEVMATKTKIYFVIEYVNRDEALNSLNRYMVECNSAAKKLTILNAFDIISLSNGFDLSGIFENSNXSIILGFGLSALPNCTKKDGLLKRICGTPAYVAPEVISQKGYAGAKADIWACGVILYVLLAGXLPFQDKNMMDMYKKICKAELKWPSWFSSDVRKLIVWALPSCTTXRIIEEISSXPWFRIGLDARLFDSTTRDYVPSDMDLALNSLNSNMVECNSAAEKLTILNAFDIISLSNGFDLSGIFENSNKVSKFTSTNTAMTIITKLMEVAKSLDLKVITKTGGLLNMEAAESGIKGVMSINAEIFQITPNYHLVEIKKINGDILEYHNFMNQSMRPALEDIVWAWHGEQPDEK

SEQ ID NO: 10712 - protein, 45 aa, Staphylococcus epidermidis
EKGFGFIEVEGENDVFVHFSAINQEGYKSLEEGQSVEFEVVEGDR

SEQ ID NO: 10713 - protein, 280 aa, Nostoc punctiforme PCC 73102
MNSSPQKFEDLSATGDVDGGSLTVEQAIANLESEDLGLRFYAAWWLGRFRIGEPAAVTGLIKALEDEADRTPEGGYPLRRNAARALGKLGDRQAVSPLIACLDCSDFYVREAAAQSLEMLGDPVCIPALIKLLAVGLQAEQLVSQQPDLSQPYEAILEALGTLRATEFIPLVKPFLEHPIELVQYAAARAMYQLTEEPAYGERLVKALAGERLQLRRAVLADLGAIGYLPAADAIAQTLAENSLKLISLKGLLEHQVNYVTPSTLSEGAIKVINLMDSLL

SEQ ID NO: 10714 - protein, 213 aa, Oryza sativa (japonica cultivar-group)
MLACIACSSKEGGEDGSRGAATPHGRDAVKSLTSQLKDMVLKFSGSNKHQHYKAATAGSPSFRSRSYRRPYPGFIDDSAFMTTTRPGGEAYMYTRAAPPPPVRAASTSMATWDMTRSKSNRGWQQDAGRSPGGTTWIQSIEEEAGADDVTVVEDAVPREWTAQVEPGVQITFVTLPGGGNDLKRIRFSRERFGEDRAKVWWEHNRDRIQAQYL

SEQ ID NO: 10715 - protein, 418 aa, Neurospora crassa; identical to SEQ ID NO: 367

SEQ ID NO: 10716 - protein, 187 aa, Triticum aestivum
  misc_feature (106)..(106): Xaa can be any naturally occurring amino acid
  misc_feature (116)..(116): Xaa can be any naturally occurring amino acid
  misc_feature (129)..(129): Xaa can be any naturally occurring amino acid
SLPLTKEKAAFSPSDPAMQRHVASGRPSGTDGSDFSYRMVVESRYQRVAEGRSRLARLILVQALHLVAGGLLLLLSLSKGAAVNKFAVLSMAAGFLAIVVGELGRXRTMAVLLRLXTSLSSIAVAFSVXCIIRSELFLKVMKQNTEAITSYEMLDAVRVALGILLQMVVIATTTRLLQNMSPPKRAS

SEQ ID NO: 10717 - protein, 199 aa, Schizosaccharomyces pombe
MGDPTNNNDSETKPNPATYWKSRFPVARIKKIMQADQDVGKVAQVTPVIMSKALELFMQSIIQESCKQTRLHQAKRVTVSHLKHAVQSVEQFDFLQDIVEKVPDAPPIKAERKTKRPRARRAANEGEHNESVPAKKVKKNTVKEEEIEKDDESATTETPVKEEPTGEETEADHEEKASVDHGNFSDKTTSEASSASGDE

SEQ ID NO: 10718 - protein, 148 aa, Aeropyrum pernix K1
MPSSFGCSRMSVNYATLGDLKKGSYIVIDGEPCRIVEMSRAKTGKHGSAKAHVVAICVFSGQKKSLVAPVDTRVQIPVIEKRLGQVLADMGDMVQIMDLETYDTFEVEKPGGNEEEEQLAAKLQPGVTVEYWLIMGKPKIIRIRSSSS

SEQ ID NO: 10719 - protein, 112 aa, Bartonella sp. ed19224az
ANEACLKMLQEIGSIKRIPEFIARAKDKNDPFRLMGFGHRVYKNYDPRAKIMQQTCHEVLKELNIQDDPLLDIAIELENIALNDEYFVEKRLYPNVDFYSGITLKALGFPTE

SEQ ID NO: 10720 - protein, 219 aa, Aspergillus nidulans FGSC A4
MSSTSPSKEPEVEQEPQSGEEHEQMDKEQDNQTQGQGEFEVKEQDRWLPIANVARIMKLALPENAKIAKEAKECMQECVSEFISFITSEASEKCQQEKRKTVNGEDILFAMTSLGFENYAEALKIYLSKYRETQSARGEHQNRPPSSGYAGGGPVGGAASGPSVVRAGGAAAGGAFPEASDNAGSIMNQGLDPSEQDASAYGYPPMVGQGHNGAGGESY

SEQ ID NO: 10721 - protein, 419 aa, Oryza sativa (japonica cultivar-group)
MPEKFTNEGNKKVVMADGADHISALPDELLQYLLSFIPSREAVQTCVLSQRWRHQWKYVPALRINDVDSFYSVQQLNKFVHHLLLHRKRTPLYVCELDSFRNGEVAEWYQYAVSCEVEMLQVDTAHSADYCRLPEMAITSNHLTTLEFSGVQLGHISLDFSGCLKLEVLVMRGCKILVQKILSQSVRSLSITQCNFELNTRTHISAPSLISLELADILGWTPALERLPSLSTAFVRLDDRCEDYCLHSYYGDCGDQVSCGKYCTRFYDVHDDDCVLLGGLSNVTNLELITSPKVFIVRKDLLMRPTFSKLKTLLLNVSDADAGFGPLVYILRSSPVLEKLTLQLYEEPKAKIETDGSCNLEEQLVASKKLKVVEIKYSKIVVLCRVLQILNTCGVPRKKINIERTELWSFGSHFSFEQT

SEQ ID NO: 10722 - protein, 178 aa, Glycine max
  misc_feature (86)..(86): Xaa can be any naturally occurring amino acid
  misc_feature (102)..(102): Xaa can be any naturally occurring amino acid
  misc_feature (115)..(115): Xaa can be any naturally occurring amino acid
  misc_feature (125)..(125): Xaa can be any naturally occurring amino acid
  misc_feature (144)..(144): Xaa can be any naturally occurring amino acid
  misc_feature (158)..(158): Xaa can be any naturally occurring amino acid
  misc_feature (174)..(174): Xaa can be any naturally occurring amino acid
MASSMISSPAVTTVNRAGAGMVAPFTGLKSMAGFPTRKTNNDITSIASNGGRVQCMQVWPPVGKKKFETLSYLPDLDDAQLAKEVXYLLKKGWIPCLKFQLXHGFMYREHNMSPXYYYGHYWTMXKLPIFGCTDTSQVLKDLQXAKTAYLNNFIHIIXFNIIHQLHIIIFITYXPSYF

SEQ ID NO: 10723 - protein, 197 aa, Zea mays
MASPFSVPSLIMEEEGRFEAEVAEVESWWGTERFRLTKRPYTARDVVLLRGTLRQSYASGEMAKKLWRTLKAHQAGGTASRTFGALDPVQVTMMAKHLDTIYVSGWQCSSTHTCTNEPGPDLADYPYDTVPNKVEHLFFAQIYHDRKQREARMSLPRAERARAPYVDCLKPIIADGDTGFGGATATVKLCKLFRERG

SEQ ID NO: 10724 - protein, 338 aa, Mesorhizobium loti MAFF303099
MKAVICRSPGELVLEDRPAPGAPPAGWALVAVSHVGICGTDYHIFEGKHPFLAYPRIMGHEVSGTVIETGEGPDLAIGEPVVINPYLSCGKCIACRHGKPNCCVKIEVLGVHRDGAMCERILVPAQNLYPANGLSLADAAAVEFLAIGAHAVRRARADSGARALVIGAGPIGLGNAIFARIAGLDVTLLDMSSERLAFAENELGFSILDGSRGAVPDLVKDATSGEGFDVVFDATGNTRSVQSAFAHVAHGGTLVLVSVVKDDIVFSDPEFHKREMTLVGSRNALRADFDHVAASIRNGAVPLAKLVTHRTTLADTPSDLARWAHEKSGLIKAVIEIG

SEQ ID NO: 10725 - protein, 168 aa, Triticum aestivum
  misc_feature (67)..(67): Xaa can be any naturally occurring amino acid
  misc_feature (126)..(126): Xaa can be any naturally occurring amino acid
  misc_feature (134)..(134): Xaa can be any naturally occurring amino acid
  misc_feature (163)..(163): Xaa can be any naturally occurring amino acid
KGTAKWFNVTKGFGFISPEDGSEDLFVHQSAIKADGYRSLNENDVVEFEVITGDDGRTKATDVTAPXGGALAGGSRPSEGGGDRCGRGGGGYCGRGYGRGGGSYRGGGGGYSSGGGSYSGGGGYGXSGGGGRYXRSSGSRRECYKCGEEGHIFRDLPPGRSGXCGGFR

SEQ ID NO: 10726 - protein, 1168 aa, Neurospora crassa
MSTAFQTTPNQSISVSATTSPSNRQYSSFHPGPTTREGPGSGYYANQHNAGQSSPHTSSQPHSRRPSAYDQPTGLEPHMSARTAFAQSIPAPVTSIASDQPPSSSDRRRNNMPTAVPPRTSSRHDPNTSSRRAQQAADRAAASRQSNTNGTMDPAVVDEAAARSRRQHQMTQDAHQRTTSSRGNPTPTSLPVRSQPNATSSRQQSSREASEILNNILIQQPEIDIERERERLAQAQAQAHAQAQAQAQAQAQAQAQQASNYNHHHRQETASQAMAAPGGDHGEESRRGHRSRHDHSKREKHTKFGEYILGNTIGEGEFGKVKLGWKQEGGVQVAIKLIKKDTVGNNPSRMAKIMREVAILKQLTHPNIVRLHKMEESDRHYGIVLEYASGGELFDYILNHRYLKDNAARRLFAQLVSGVGYLHKKGIVHRDLKLENLLLDRNRNIIITDFGFANTFDPNQELSEEEELNLSDREFVKRMGLDKVNDAGWRKGDLMQTSCGSPCYAAPELVVSDSLYTGRKVDVWSCGVILYAMLAGYLPFDDDPANPEGDNINLLYKYIVNTPLTFPEYVTPHARDLLRRILVPNPRKRADLFEVARHSWLSEYSHVVEFITSSTTTPSEIQNTTVPAEDEGESPHLARSASVREAPKKSTASPAIGGLVSKQGTVDPEAEAAYAKQQRDNKRRTVQVEYVAPNTTTQRGDIAGQQQPSSNANRNRNESQAPVESSDSRPTTSAKDKQLSQGPSAPKDAYNNKPPVSSRRPPSSQRNGGNAPTTGNAVAPPRPSRDGRPTADNQYLSGAAGAPTQRPTTGGSMQSGRPSYAQPAPPEVADANVHGRIQQPSKGSGSSHFGVPTTTPAEQQPSESADYGRPSISTGSRFDKVREDGVVKGHKRSSTMGEIGGKLFGRSGSLFGGRKSKRQQELQQAGEKTKRYPPVSMNNSMPGGENGSRPSLDSKRSRRSFSMGMGKKSSGGSITGSNGSQEKSNKRFSFIPPSLSRAFGYNKEDEPPALDSQQDLPIQEPSSVDQFLGREQNVSATTVDGMYTQLQDSQQGSPAVNTQYQYGRPSASQGFMPGTMPNAGSDPSVNSMPQAPGSTPQLQTMTQQDGLYDARKGNSRANRGVLQKNKRFVDYEGDGFARPHDHSGSSGPARKVMDFFRRRGKARGGENN

SEQ ID NO: 10727 - protein, 390 aa, Phlebia radiata
MAFNFAAILAFVSLAAVTSAAPSKTTCSNGVVVPDAVCCDFVPLASALQSEVLMGDCGEDAHELVRLIFHDAIAISQSMGPSAGGGADGSMLIFPTVEPAFFPNLGIADSVNNLIPFLSQFPTISAGDLVHFAGAVAISNCPGAPQLEFLAGRPNATAPAIDGLIPEPQDDVTKILARFKDAGNFSPAEVVALLASHSIARADHVDPTLDAAPFDSTPFDFDTQVFLEVLLKGVGFPGLANNTGEVSSPLPVTDGTDVGELRLQSDFALARDERTACAWQSFVNEQEAMATAFKNAVKKLAVLGHNRNDLVDCSAVVPVPKPATGTPATFPASTGPQDLELTCTTEPFPTLSTAPGAQQTLIPHCSDGTMTCNSVQFDGPATNFGGADDS

SEQ ID NO: 10728 - protein, 153 aa, Zea mays
  misc_feature (21)..(21): Xaa can be any naturally occurring amino acid
  misc_feature (23)..(23): Xaa can be any naturally occurring amino acid
  misc_feature (75)..(75): Xaa can be any naturally occurring amino acid
  misc_feature (78)..(78): Xaa can be any naturally occurring amino acid
  misc_feature (81)..(81): Xaa can be any naturally occurring amino acid
  misc_feature (94)..(94): Xaa can be any naturally occurring amino acid
  misc_feature (98)..(98): Xaa can be any naturally occurring amino acid
  misc_feature (105)..(105): Xaa can be any naturally occurring amino acid
  misc_feature (108)..(108): Xaa can be any naturally occurring amino acid
  misc_feature (118)..(118): Xaa can be any naturally occurring amino acid
MASSMLSSAAVVTSPAQATMXRXPFTGLKSSSAFPVTRKANNDITSIVSNGGRVSCMKVWPPVGKKKFETLSYPXLTXTEXELGKEVDYLLRHXWIPXCVEFELXHGXVYREHGSTPXYYDGRYWNNGGSFPLVRMALPLPGLKGSRGQNGVP

SEQ ID NO: 10729 - protein, 407 aa, Gloeobacter violaceus PCC 7421
MSRVLFRQVRRLDPDTGTDSIADWLWDSATGRAEPTGDPAVRADRAIDGAGRLILAPTLCDLYVRSGEPGHEEREDLASLAAAAAAGGYSQVAILPHTEPPVDDPAQVDFLRRHFPAGPVEALVLGAISRNCAGEALAEVSSLLEAGVVGFTDARPLANWALLRRFLDYAAVLERPVLVWPCFAPLATGIALEGDWAIRLGLAGRPPQAEGIALAGVLELVRLTGTAVHLMRLSTARSVEMAAQAKADGLPVTASTTVHHLVHASPDLAEYDPNLRFEPPLGNPADRAALVAALEAGIIDAVASDHTPWTYEEKTLPFSQAPPGAIALELVLPLVWNLVREGRLTPLRAWEALSSAPRRILALKHPQVLVLFDPDKTWVPGTDTLHSRSLATAWLGRTVQGRVLEVF

SEQ ID NO: 10730 - protein, 430 aa, Haemophilus influenzae R2866
MMDEQSLLAFDTQHIWHPYSSVSSDMPLYAVERADGVMITLKDGRRLIDGMSSWWAALHGYNHPRLNAAAQNQLAKMSHIMFGGFTHDPAVELAQLLVQILPNGLDKIFFADSGSVAVEVAMKMAIQYQHAKGEVQRQKFATIRSGYHGDTWNAMSVCDPTTGMHHLFHHSLPVQYFLPQPNIPFNESWNDCVIEPLADLLKKKGSEIAALILEPVVQGAGGMYFYSPTYLVKAQALCKQYGVLLIFDEIATGFGRTGKLFAAEHAGISPDIMCIGKALTGGYLTLSASITTTEIAQTICSGEAKCFMHGPTFMANPLACAIATESIRLLLESPWQQNIQRIEHYLKQQLSPLSEKDYVKEVRVLGAIGVVEMKSAVNMKTLVPRFVEQGVWIRPFGKLVYVMPPFVIKDDELQKLTEGMILALIQEYEH

SEQ ID NO: 10731 - protein, 481 aa, Gibberella zeae PH-1
MAVGSSKQINFTEFYNLIDGKLETTKETLQNTNPSTLEKNHPAPVATQEDVDRAVEAAKKASESWSEVPWEERQALVTKYAEGIDALKDEFAHLLVKEQGKSLAMAHFEIMLSVQFLKGYASLPDPQRVIEDKPDCKVVTKYVPLGVAVGIVPWNFPIFLTTAKIGPALIAGNSFILKPSPFTPYCGLKLAELASQYFPSGVVQALSGDDNLGPWLTAHPGVDKISFTGSTATGKKVVASAAPTLKRVTLELGGNDPSIVCDDVDVKEVAPKIAFAALMNSGQLCMAIKRVYVHESIYDDFVKELAAAVNSFTVGDGMDEKTSLGPVQNQMQFDRVKNLLADIESNGYKLAAGSTSASTAGKGYFITPTIVENPPDESRIVVEEPFGPVFPVLKWTDEADVLRRANDTDMGLSASVWTKDMEKAERLSSKIKAGTVWVNNHVQLNPAVPFGGAKHSGHGAEHGIEGIKAYCTTKSLYFNKA

SEQ ID NO: 10732 - protein, 381 aa, Arabidopsis thaliana
MTNHLQDPLPTYPKPVLTKEEQEVDEKMVSLQAESIVNTVAFPMVLKAAFELGVIDTIAAAGNDTWLSPCEIACSLPTKPTNPEAPVLLDRMLSLLVSHSILKCRMIETGENGRTGKIERVYAAEPVCKYFLRDSDGTGSLVPLFMLLHTQVFFKTWTNLKDVILEGRDAFNSAHGMKIFEYINSDQPFAELFNRAMSEPSTMIMKKVLDVYRGFEDVNTLVDVGGGNGTVLGLVTSKYPHIKGVNFDLAQVLTQAPFYPGVEHVSGDMFVEVPKGDAVFMKWILHDWGDEDCIKILKNCWKSLPEKGKIIIVEFVTPKEPKGGDLSSNTVFAMDLLMLTQCSGGKERSLSQFENLAFASGFLRCEIICLAYSYSVIEFHK

SEQ ID NO: 10733 - protein, 490 aa, Leuconostoc mesenteroides
MEIQNKAMLITYADSLGKNLKDVHQVLKEDIGDAIGGVHLLPFFPSTGDRGFAPADYTRVDAAFGDWKDVEALGEEYYLMFDFMINHISRESVMYQDFKKNHDDSKYKDFFIRWEKFWAKAGENRPTQADVDLIYKRKDKAPTQEITFDDGTTENLWNTFGEEQIDIDVNSAIAKEFIKTTLEDMVKHGANLIRLDAFAYAVKKVDTNDFFVEPEIWDTLNEVREILTPLKAEILPEIHEHYSIPKKINDHGYFTYDFALPMTTLYTLYSGKTNQLAKWLKMSPMKQFTTLDTHDGIGVVDARDILTDDEIDYASEQLYKVGANVKKTYSSASYNNLDIYQINSTYYSALGNDDAAYLLSRVFQVFAPGIPQIYYVGLLAGENDIALLESTKEGRNINRHYYTREEVKSEVKRPVVANLLKLLSWRNESPAFDLAGSITVDTPTDTTIVVTRQDENGQNKAVLTADAANKTFEIVENDQTVMSSDNLTQN

SEQ ID NO: 10734 - protein, 381 aa, Arabidopsis thaliana
MSNHLQDPLTTYPKPGLTKEEQEIDEKMVSLQAESIVNAVAFPMVLKAALELGVIDTIAAASNGTWLSPSEIAVSLPNKPTNPEAPVLLDRMLRLLVSHSILKCCMVESRENGQTGKIERVYAAEPICKYFLKDSDGSGSLSSLLLLLHSQVILKTWTNLKDVILEGKDAFSSAHDMRLFEYISSDDQFSKLFHRAMSESSTMVMKKVLEEYRGFEDVNTLVDVGGGIGTILGLITSKYPHIKGVNFDLAQVLTQAPFYPGVKHVSGDMFIEVPKGDAIFMKWILHDWGDEDCIKILKNCWKSLPEKGKVIIVEMITPMEPKPNDFSCNTVLGMDLLMLTQCSGGKERSLSQFENLAFASGFLLCEIICLSYSYSVIEFHK

SEQ ID NO: 10735 - protein, 45 aa, Staphylococcus intermedius
EKGFGFIEVEGENDVFVHFSAINQDGYKSLEEGQAVEFEVVEGDR

SEQ ID NO: 10736 - protein, 493 aa, Pseudomonas syringae pv. tomato str. DC3000
MSLTRFQMCIDGQWVDALSGKTFDSLNPALAEPWAQLPDAGEADVERAVQAAQKAFESQEWRGLTATARGKLLRRLGDLIAENKEHLAQLESRDNGKLIRETRGQVSYLPEFFHYTAGLADKLEGGTLPLDKPDLFAYTVHEPMGVVAGIIPWNSPLYLTAIKLAPALAAGNTIVLKPSEHASATVLELARLALEAGIAPGVVNVITGYGPTTGAALTRHPLVRKIAFTGGAATARHVVRSSAENFAKLSLELGGKSPNIIFADADLDSAINGAVAGIYAASGQSCVSGSRLLVQDEIYDEFVERLAERASRIRIGNPLDESTEMGPMATAQQLAVVEGLVADALAEGARLRLGGKRPELDSKGWFYEPTLFECDHNSMKIMQEEVFGPVASVIRFKDEAEALAIANDSQFGLAAGIWTRDLGRAHRLARDIRSGIIWVNTYRAVSAMAPIGGFKNSGYGRESGIDSVLAYTELKTVWINLSQAPMPDPFVMR

SEQ ID NO: 10737 - protein, 281 aa, Clostridium tetani E88
MDLWLKEGQISDAVMTYKIKETLVRKKTEYQDLAIVDTYALGRMLVLDGIVQTSIKDEYVYHEMITHIPLYTHPNPKKVLVVGGGDGGTIREILKHPSVEKAVLCEIDEEVVKECKKHLPEISNNALEDSRCEVFIGDGIKYVNEHKNEFDVVIIDSTDPFGAAEGLFGGSFYGKISECLTEDGIFVAQTETPFYLPEIVKRVYDDSKAVFPVTKLFMAAIPTYPSGYWSFTIGSKKHDPEKAPVPEVLPFETKYYTPRLHSASFVLPKFVENLIFANISE

SEQ ID NO: 10738 - protein, 45 aa, Streptococcus pyogenes
EKGFGFISTENGQDVFAHFSAIQTNGFKTLEEGQKVAFDVEEGQR

SEQ ID NO: 10739 - protein, 217 aa, Oryza sativa (japonica cultivar-group)
MASTELASDVYALPCGDDGTTALSTPVVVSVLASLLERHIARNERDQAAAADGEAARRARAFDSGTVLDMSLHAFLERFSRYANVSPQVYVVAYAYLDRLRRGDGVRVVSANAQRLLTTAILVASKFVEDRNYKNSYFAAVGGLTAAELSSLELDFLFLMQFRLNVSVSVFQSYCRHLEREVSYGGGYQVERCLKKALVCSGEAQAQQRQAASAAAQ

SEQ ID NO: 10740 - protein, 370 aa, Glycine max
  misc_feature (89)..(89): Xaa can be any naturally occurring amino acid
  misc_feature (154)..(154): Xaa can be any naturally occurring amino acid
  misc_feature (188)..(188): Xaa can be any naturally occurring amino acid
  misc_feature (313)..(313): Xaa can be any naturally occurring amino acid
METVLFNHSPPLEFKGLSKEEEDSLLGQVEIWRYMTCFTDSVALKAVIELRIADILDRYGKPLSLSQIVENIEDAPSPDASLLQRVLRXMVRRKIFSAQESETGETLFGLTRASKWILRDTKMTLAPMLLLENHPIHLNPAHYISEIIREGTKXALAFFKCHGHEQFEMTGLDPEYNRLFNEGMVCTXARVVSKAVITGYKDGFNQIKSLVDVGGGIGGSLSEIVRAYPHINAINFDLPHVVATAPKFDGITHVGGDMFVSIPSADAIYMKWILHDWSDEHCIKILKNCRKAIPEKTGKVIIVDHVLRPEGQXLFTDVGIAFDMMLLAHNAGGKERTEENWKWLFKETGFARYNIIKINALPSIIEAFPI

SEQ ID NO: 10741 - protein, 46 aa, Salmonella enterica subsp. enterica serovar Virchow
DKGFGFITPDDGSKDVFVHFSAIQNDGYKSLDEGQKVSFTIESGAK

SEQ ID NO: 10742 - protein, 130 aa, Nostoc punctiforme PCC 73102
MSAATDQILEQLKTLSLLEASELVKQIEEAFGVSAAAPVGGMMMMAGPGGAAPAEEAVEQTEFEVILDSVPADKKIAVLKIVRELTGLGLKEAKDLVEAAPKAVKEGIAKDAAEDAKKRIEEAGGKVTIK

SEQ ID NO: 10743 - protein, 46 aa, Yersinia enterocolitica
DKGFGFITPADGSKDVFVHFSAIQSNDFKTLDEGQKVEFSIENGAK

SEQ ID NO: 10744 - protein, 476 aa, Pseudomonas syringae pv. tomato str. DC3000
MYPDVQLYIDGQWRASRDGRSIPVIDPATGQSLGSVAHAGIADLDEALSAAERGFATWRATSAYDRYKLMQKAADLVRERADSIARIMTQEQGKPLAEARMETLSAADVIDWLAEEGRRSYGRIVPSRGVSIEQKVIKEPVGPVAAFTPWNFPINQVVRKLSSALAAGCSIIVKAPEETPGSPAELIRAFADAGVPAGVIGLVYGDPAEISGYLIPHPVIRKVTFTGSTPVGKQLAALAGKHMKRATMELGGHAPALVFDDADIDLAARVLATAKFRNAGQVCVSPTRILVQRKVLQAFTEKFVGLTREIKVGNGLESGTTMGPVANDRRIPALVDLIEDAVSAGATVSAGGKAVEGQGYFFEPTVLSGLTPAMRIMNEEPFGPVALLVPFDTVEEAIVESNRVPFGLASYAFTTSMKTAQALSTYIEAGMLSINHQGIGLPEVPFGGIKDSGYGSEGGTEAIEAYLNTKLVTQYS

SEQ ID NO: 10745 - protein, 499 aa, Streptomyces avermitilis MA-4680
MTPGTPGNPAAPVTPGASDAQRLFIGGEWVAPDGGHYEVIDPATEAVVGWAPEASRDQVHAAAAAAREAFAAWSRTPAEERAAVLGRAAEVMRRNLVPYAELAQAESGATTGTARGMQVGVGAARFRRYARVEPAEEPIAPQINEAGPFGRAAVMGALAVRQPVGVVTCITSYNNPWANPAGKIAPALAMGNTVVVKPAPQDPLSVYRMAEALQAAGVPPGVVNVVSGSGAQAGEAAVDCPDVDMVSFTGSTAVGQRIAEVCGRGMKRQLMELGGKGAALVFEDADLASAVSGIGTTFSFYSGQICTAPTRVLAQRGVYDRVVDQLAAYARRLPVGDPRAPGTVVGPVISAAHRDRVESYVELGRKEGARVVTGGERPPCATGFYVAPTLLADCTTDMRVVREEIFGPVVAVLPFDDEEEGIELANSSDYGLIDYVWSADVARAFRVARRLRAGGVGVNTVGRNMEAPFGGFKRSGVGRDVGSYALHAYSELQAIVWPG

SEQ ID NO: 10746 - protein, 398 aa, Glycine max
MSLTLQTPPSTTLSSASPIHRTITRYTTFSFSLRPPTTLHFNPHRSLPLIRASNSSINAASTTELDAVSAFSEIVPDTVVFDDFEKFPPTAATVSSSLLLGICGLPDTIFRNAVEMALADSECYGLENPNARLSCFVNKAFANIGSDMAKLVPGRVSTEVDARLAYDTHAIIRKVHDLLKLYNDSNVPPQRLLFKIPSTWQGIEAARLLESEGIQTHLTFVYSFAQAAAAAQAGASVIQIFVGRIRDWARNHSGDTEIESAQLRGEDPGLALVTKAYNYIHKYGHKSKLMAAAVRNKQDLFSLLGVDYIIAPLKVLQSLKESVASPDEKYSFVRRLSPQSAAKYTFSDEELVRWDEDSLSKAMGPAAVQLLAAGLDGHADQAKRVEELFGKIWPPPNV

SEQ ID NO: 10747 - protein, 308 aa, Pseudomonas putida KT2440
MTSKLEQLKQFTTVVADTGDLDAITRLKPVDATTNPSLLLKAAAIPGYADLLKQVKADAKGNVDLACDKFAVAVGSGILKVIPGRISTEVDARLSFDEPALLNKARQLIALYEAAGVAKERVLIKLASTWEGIRAAEQLEKEGIQTNLTLLFSFAQAQACADAGVFLISPFVGRIYDWYKKSTGQEYVGAEDPGVQSVTRIYNYYKANGYNTVVMGASFRNIGQIEQLAGCDRLTISPELLQQLSDDQGELPQVLKPGNAGEAKQHLNESQFRWAMNEDAMGTEKLAEGIRQFARDQEKLEKLIAEKA

SEQ ID NO: 10748 - protein, 416 aa, Deinococcus radiodurans R1
MTITITNIKRVGSEQTESLTIENGLIKGWNLPAEGEIFDGQGGTLAPALIELHAHLREPGQTEKEDLASGLAAASAGGYGTVVCMPNTRPVIDDPALVRSLIEKARGLGFARLRPAAAVTKGEKGEQLTEMSYLKEAGAVMFTDDGLTNENARVLRLGMEYAKSLGMVISVHAEDDALRAGGVMNEGPVSESLGLPGNPAAAAAARVARDMEIVALTGARLHVQHLSTARELDIVRDAKRRGLPVTCEVCPHHLDLTDESLRTFDAMYKVAPPLRTRADADYLLEGLLDGSVDCIATDHAPHTRAEKERDLLDAPSGIAYIEIAFPIMWTRFGERLGLEKLIDLMTAGPARVMGWPEPSLEAGAPADMVVLDLETEREVNPAEFKSKAKFTPWQGQKLRGFPLLTVVDGKVAYRRE

SEQ ID NO: 10749 - protein, 159 aa, Burkholderia cepacia R18194
MSTLYSFSAETLAGAPASLDAYRGKVLLIVNTASECGFTPQYAGLQKLYDQYAARGFYVLGFPCNQFGKQEPGDAAQIGAFCERNYGVTFPMFAKIDVKGDHAHPLYRYLTDEAPGILGLKAIKWNFTKFLVDREGRIVKRYAPSTKPDEIAADIDKLL

SEQ ID NO: 10750 - protein, 161 aa, Brassica napus
  misc_feature (2)..(2): Xaa can be any naturally occurring amino acid
  misc_feature (20)..(20): Xaa can be any naturally occurring amino acid
  misc_feature (24)..(24): Xaa can be any naturally occurring amino acid
  misc_feature (26)..(26): Xaa can be any naturally occurring amino acid
  misc_feature (30)..(30): Xaa can be any naturally occurring amino acid
  misc_feature (33)..(33): Xaa can be any naturally occurring amino acid
  misc_feature (36)..(36): Xaa can be any naturally occurring amino acid
  misc_feature (38)..(38): Xaa can be any naturally occurring amino acid
  misc_feature (42)..(42): Xaa can be any naturally occurring amino acid
  misc_feature (48)..(52): Xaa can be any naturally occurring amino acid
  misc_feature (54)..(54): Xaa can be any naturally occurring amino acid
  misc_feature (58)..(58): Xaa can be any naturally occurring amino acid
  misc_feature (60)..(63): Xaa can be any naturally occurring amino acid
  misc_feature (78)..(78): Xaa can be any naturally occurring amino acid
  misc_feature (80)..(80): Xaa can be any naturally occurring amino acid
  misc_feature (86)..(86): Xaa can be any naturally occurring amino acid
  misc_feature (92)..(95): Xaa can be any naturally occurring amino acid
  misc_feature (99)..(99): Xaa can be any naturally occurring amino acid
  misc_feature (104)..(105): Xaa can be any naturally occurring amino acid
  misc_feature (109)..(109): Xaa can be any naturally occurring amino acid
  misc_feature (121)..(121): Xaa can be any naturally occurring amino acid
  misc_feature (123)..(124): Xaa can be any naturally occurring amino acid
  misc_feature (127)..(127): Xaa can be any naturally occurring amino acid
  misc_feature (129)..(129): Xaa can be any naturally occurring amino acid
  misc_feature (131)..(134): Xaa can be any naturally occurring amino acid
  misc_feature (143)..(145): Xaa can be any naturally occurring amino acid
  misc_feature (148)..(148): Xaa can be any naturally occurring amino acid
  misc_feature (150)..(150): Xaa can be any naturally occurring amino acid
  misc_feature (152)..(152): Xaa can be any naturally occurring amino acid
  misc_feature (155)..(156): Xaa can be any naturally occurring amino acid
  misc_feature (160)..(160): Xaa can be any naturally occurring amino acid
MXSSMLFLRCVSPTSPGHAXMVAXFXGLKXSAXFPXTXLADXDITSIXXXXXRXSCMXVXXXXGKKKFETLSYLPDLXEXELTEEXEYLLRXXXXPCVXFELQXXFVYXEHVCTPGYDDGXYXXRWXVXLXXXXDSARVMKEXXXVKXGXPXAFXXIIGXD

SEQ ID NO: 10751 - protein, 199 aa, Zea mays
MEDEEHEVYGQEIPVDGEDVDMSAGDDATKLQELDEMKRRLKEMEEEAAALREMQAKVAKDMQDPNATTSENKEEMDSRSVFVGNVDYACTPEEVQQHFNSCGTVNRVTILTDKFGQPKGFAYVEFVEVEAVQEAIKLNESELHGRQLKVAPKRTNVPGMKQPRGRGFNPYRPYGYSPYGYGYGYGRFPRFRRPRRPYF

SEQ ID NO: 10752 - protein, 107 aa, Triticum aestivum
  misc_feature (28)..(28): Xaa can be any naturally occurring amino acid
  misc_feature (32)..(33): Xaa can be any naturally occurring amino acid
  misc_feature (49)..(50): Xaa can be any naturally occurring amino acid
  misc_feature (61)..(61): Xaa can be any naturally occurring amino acid
  misc_feature (63)..(63): Xaa can be any naturally occurring amino acid
  misc_feature (78)..(78): Xaa can be any naturally occurring amino acid
  misc_feature (80)..(80): Xaa can be any naturally occurring amino acid
  misc_feature (87)..(87): Xaa can be any naturally occurring amino acid
  misc_feature (93)..(93): Xaa can be any naturally occurring amino acid
  misc_feature (98)..(99): Xaa can be any naturally occurring amino acid
  misc_feature (103)..(103): Xaa can be any naturally occurring amino acid
  misc_feature (106)..(106): Xaa can be any naturally occurring amino acid
VPVEPHLGCSSNILRGGEGASPEGFSGXPGAXXNPPAAGDGGLPGGVNXXKQPGWGGPFPXSXHAHGIQFRLYALDDXFXLGNKVTXDKFMEXIEGHXXGEAXITXV

SEQ ID NO: 10753 - protein, 422 aa, Staphylococcus aureus subsp. aureus MRSA252
MTAEKITQGTEGLNVPNEPIIPFIIGDGIGPDIWKAASRVIDAAVEKAYNGEKRIEWKEVLAGQKAFDTTGEWLPQETLDTIKEYLIAVKGPLTTPIGGGIRSLNVALRQELDLFTCLRPVRWFKGVPSPVKRPQDVDMVIFRENTEDIYAGIEFKEGTTEVKKVIDFLQNEMGATNIRFPETSGIGIKPVSKEGTERLVRAAIQYAIDNNRKSVTLVHKGNIMKFTEGSFKQWGYDLALTEFGDQVFTWQQYDEIVEKEGRDAANVAQEKAEKEGKIIIKDSIADIFLQQILTRPAEHDVVATMNLNGDYISDALAAQVGGIGIAPGANINYETGHAIFEATHGTAPKYAGLNKVNPSSVILSSVLMLEHLGWQEAADKITDSIEDTIASKVVTYDFARLMDGAEEVSTSAFADELIKNLK

SEQ ID NO: 10754 - protein, 283 aa, Triticum aestivum
  misc_feature (135)..(135): Xaa can be any naturally occurring amino acid
  misc_feature (198)..(198): Xaa can be any naturally occurring amino acid
MAKTYPVVSAEYQEAVEKARQKLRALIAEKNCSPLMLRLAWHSAGTFDVSSKTGGPFGTMKKPAEQAHAANAGLDIAVRMLEPIKEEIPTISYADLYQLAGVVAVEVSGGPVIPFHPGREDKPQPPPEGRLPDAXQGSDHLRQVFGKQMGLSDQDIVALSGGHTLVSLHICSICFHVIYLDRCMHALTLFSCVSLFLXGRCHKERSGFEGPWTRNPLKFDNSYFTELLSGDKEGLLQLPSDKTLLTDPVFRPLVEKYAADEKAFFEDYKEAHLRLSELGYAEA

SEQ ID NO: 10755 - protein, 373 aa, Staphylococcus aureus subsp. aureus MRSA252
MAELQRGLEGVIAAETKISSIIESQLTYAGYDIDDLAENAQFEEVIFLLWNYRLPNEEELAHLKGKLNQYMTLNPRVYTHFEEYVTDHVHPMTALRTSLSYIAHFDPDAENESDENRYERAMRIQAKVASLVTAFARVRQDKEPIKPNPDLSYAANFLYMLRGELPTDIEVEAFNKALILHADHELNASAFTARCAVSSLSDMYSGIVAAVGSLKGPLHGGANEQVMTMLSEIGSIENVDAYLDEKFANKDKVMGFGHRVYKDGDPRAKYLREMSRQITKDAGREELFEMSVKMEKRMAEEKGLIPNVDFYSASVYHCMEIPHDLFTPIFAVSRSAGWIAHILEQYKDNRIMRPRAKYIGETNRKYIPLEERK

SEQ ID NO: 10756 - protein, 486 aa, Pseudomonas putida
MKEIKHFINGEYVESASGKLFDNVNPANGQVIAKIHEAGEAEVDAAVKAARAALKGPWGRMTVAERTEILHRVAAGISARFDEFLEAECLDTGKPKSLASHIDIPRGAANFSVFADLVKNVPTEAFEMATPDGTGALNYGVRRPKGVIGVISPWNLPLLLMTWKVGPALACGNTVVVKPSEETPTTTALLGEVMNAAGVPAGVYNVVHGFGGNSAGAFLTAHPDVDAYTFTGETGTGETIMRAAAKGLRQVSLELGGKNAGIVFADCDLDKAIEGTLRSAFANCGQVCLGTERVYVERSIFDEFVARLKAGAEALVIGPPDDASSNFGPLVSLKHREKVLSYYQQAVDDGATVVTGGGVPEMPAHLAGGAWVQPTIWTGLADNSVVVTEEIFGPCCHIRPFDREEEAIELANSLPYGLASAIWTENASRAHRVAGQIEAGIVWVNSWFLRDLRTAFGGSKQSGIGREGGVHSLEFYTELKNICVKL

SEQ ID NO: 10757 - protein, 346 aa, Glycine max
LEPLGVVGHITPWNFPNTMFYIKVAPSLAAGCTMVLKPAEQTPLSALFNAHLAKLAGIPDGVINVVPGFGPTAGAALSSHMDVDKVSFTGSTQTGREIMQAAAKSNLKQVSLELGGKSPLIIFDDADIDKAAELALLGILYNKGEVCVASSRVLVQEGIYDEFEKKLVEKAKAWVVGDPFDPKVQQGPQVDKEQFEKVLSYIEHGKKEGATLLTGGKTVGNKGYFIEPTIFSNIREDMLIAQDEIFGPVMALKKFKTIEEAIKSANNTKYGLAAGIVTKNLDTANTVSRSIRAGTIWINCYFAFGDDVPFGGYKMSGFGKDHGLEALHKYLQVKSVVTPLYNSPWL

SEQ ID NO: 10758 - protein, 128 aa, Brassica napus
MATVGRNIAAPLLFLNLIMYLIVLGFASWCINKYINGQTNHPSFGGNGATPFFLTFSILAAVIGIASKLAGGNHIRFWRNDSLAAAGSASIVAWAVTALAMGLACKQINIGGWRGWRLRMIEAFIIIY

SEQ ID NO: 10759 - protein, 428 aa, Pseudomonas aeruginosa PAO1
MADKKAQLIIEGSAPVELPVLSGTMGPDVVDVRGLTATGHFTFDPGFMSTASCESKITYIDGDKGVLLHRGYPIEQLAEKSDYLETCYLLLNGELPTAAQKEQFVGTIKNHTMVHEQLKTFFNGFRRDAHPMAVMCGVIGALSAFYHDSLDINNPKHREVSAHRLIAKMPTIAAMVYKYSKGEPMMYPRNDLNYAENFLHMMFNTPCETKPISPVLAKAMDRIFILHADHEQNASTSTVRLAGSSGANPFACIASGIAALWGPAHGGANEAVLRMLDEIGDVSNIDKFVEKAKDKNDPFKLMGFGHRVYKNFDPRAKVMKQTCDEVLQELGINDPQLELAMKLEEIARHDPYFVERNLYPNVDFYSGIILKAIGIPTSMFTVIFALARTVGWISHWQEMLSGPYKIGRPRQLYTGHTQRDFTALKDRG

SEQ ID NO: 10760 - protein, 282 aa, Bifidobacterium longum DJO10A
MLEPPVTPIRKANDGLELPATGFGTYKVNGLAGVDAIKSAIHQGYRLIDSAFNYENEGVVGRAIRESGVPREDIIVTSKLPGRHHAHDEALLTIEESVCRMGLDYIDLYLIHWPNPSQGQFVEAWEALVEARERGLVKHIGVSNFLPGHIDLLIRDTGVTPAVNQVELHPYFQQREQLAYDNAHGIITEAWSPLGRANQMLRDPDLKRIAAKHGISVVQAILRWHLQYGDVAIPKSLNPERQRQNLDLTAFELDDQDMADIAAMDNPEGHTFGQNPHWHEEA

SEQ ID NO: 10761 - protein, 237 aa, Fischerella sp. PCC 7603
MTEATAEEYSPTNAPPLTKEQALSNLQSPDLSLRYYAAWWLGKFRVRSPAVVDALLAALEDETDRTEMGGYPLRRNAARALGKLGDLRAVPGLIKCLQCSDFYVREAAAQSLAMLKDKRAAQALMQLLEPGVAAAVQVPGRPHLTQPYEAILEALGAMGATEAIPLIEPFLEHPMPRVQCAAARAMYQLTRDFCYGEYLVKMLDSSNLQLRRVALADLGAIGYMPAAEAIAAGQGRK

SEQ ID NO: 10762 - protein, 400 aa, Zea mays
MYSLGRKLGQGQFGTTYLCVDKATGLEYACKSIAKRKLVTDEDVEDVRREIQIMHHLAGHPNIIAIRGAYEDSVAVHVVMELCAGGELFDRIVRRGHYTERQAGELARVIVAVVESCHSLGVMHRDLKPENFLFVGNDEESPLKTIDFGLSMFFRPGEEFTDVVGSPYYVAPEVLKKRYGQEADVWSAGVIIYILLCGVPPFWAETEQGIFEQVLHGSLDFDSDPWPSVSGDAKDLLRKVLVRDPKKRLTAHQVLCHPWLQTIASAPDKPLDSAVLSRLKQFSAMNKLKKMALRVIAENLSEEEIAGLKEMFKMMDTDNSGQINFEELKAGLEKVGANMKESEIYQLMQAADIDNSGTIDYGEFIAATLHLNKIEREDHLFAAFQYFDKDGSGYITADEL

SEQ ID NO: 10763 - protein, 165 aa, Aegilops speltoides
VMASSATTVTPFHGLKSTAGLPVSRRSSGSLGRVSNGGRIRCMQVWPIEGIKKFETLSYLPPLSTEALLKQVDYLIRSKWVPCLEFSKVGFVFREHNSSPGYYDGRYWTMWKLPMFGCTDATQVLNEVEEVKKEYPDAYVRVIGFDNLRQVQCVSFSAFRPPGCE

SEQ ID NO: 10764 - protein, 165 aa, Aegilops speltoides
VMASSATTVTPFHGLKSTAGLPVSRRSSGSLGRVSNGGRIRCMQVWPIEGIKKFETLSYLPPLSTEALLKQVDYLIRSKWVPCLEFSKVGFVFREHNSSPGYYDGRYWTMWKLPMFGCTDATQVLSEVEEVKKEYSDAYVRVIGFDNLRQVQCVSFIAFRPPGCE

SEQ ID NO: 10765 - protein, 213 aa, Arabidopsis thaliana
MGCFHSKAAKEFRGHEDPVKLASETAFSVSEVEALFELFKSISSSVVDDGLINKEEFQLALFKSRKRENIFANRIFDMFDVKRKGVIDFGDFVRSLNVFHPNASLEDKIDFTFRLYDMDCTGYIERQEVKQMLIALLCESEMKLADETIEIILDKTFEDADVNQDGKIDKLEWSDFVNKNPSLLKIMTLPYLRDITTTFPSFVFHSEVDEIAT

SEQ ID NO: 10766 - protein, 165 aa, Aegilops speltoides
VMASSATTVTPFHGLKSTAGLPVSRRSSGSLGRVSNGGRIRCMQVWPIEGIKKFETLSYLPPLSTEALLKQVDYLIRSKWVPCLEFSKVGFVFREHNSSPGYYDGRYWTMWKLPMFGCTDATQVLSEVEEVKKEYPDAYVRVIGFDNLRQVQCVSFIAFRPPGCE

SEQ ID NO: 10767 - protein, 435 aa, Zea mays
MSQRDGDLTGAHPEEGDRHAVRMDGSDDDELDQPTSKATEHITAMDVRKGKDMQGIPWNVMPTTRDKYRQSRLQGYANFENVPNSGRLSEKECMPAEKGQLYYEFQHSTRSVKPTIRHFQLRNLVWATTRHDVYLMSNFSVLHWSAMTCKKQEVINLLGHVTPCEKHHRNYYEGFYRTPVSTLAVKHNLLVTGGFHGEIICKFLDRQGVSYCCKTTNDDDGITNSLEIFEKPSGSLHFLASNNDCGLRDFDMEKFRICNHFHFAWPVNHTSLSPDGKLAAIVGDSPDGLLIDANSGKTVHKLHGHLDYSFASAWNPDGRTFATGNQDKTCRVWDVRNLSRSVVVLGGNIGAVRSIRYTPDGKFMAMTEPADFIHIFDVESGYSRKQELDFFGEIAGISFSPDTEALFVGVHDRFFSCCLLQFNRRRFYSYLDSTL

SEQ ID NO: 10768 - protein, 488 aa, Listeria monocytogenes EGD-e
MADVRKLKNYIDGEWVESKTDKYEDVINPATGEVLCQVPISTRAELDQAAVIAEQAFEKWSQVAVPRRARVLFGFQQLLIQHKEELARLITLENGKNLSEARGEVQRGIENVEFAAGAPTLMMGDSLASIATDVEAANYRYPVGVVGGIAPFNFPMMVPCWMFPMAIALGNSFILKPSERTPLLMEKLVELFSEAGLPKGVFNVVYGAHDVVNGILENEIIKAVSFVGSKPVGEYVYKTGSANLKRVQALTGAKNHTIVLNDADLEDTVTNVISAAFGSAGERCMACAVVTVEEGIADEFLEALRTAAQNVKIGNGLDDGVFLGPVIREENQKRTIAYIEKGIEEGAKLTVDGRETGLSEGHFVGPTILEDVTTDMTIWKDEIFAPVLSVIRVKNLQEAVRVANQSEFANGACIFTNNAKAIRYFREKIDAGMLGVNLGVPAPMAFFPFSGWKSSFYGTLHANGKDSVDFYTHKKVVTARYSLKGYEE

SEQ ID NO: 10769 - protein, 165 aa, Aegilops speltoides
VMASSATTVTPFHGLKSTAGLPVSRRSSGSLGRVSNGGRIRCMQVWPIEGIKKFETLSYLPPLSTEALLKQVDYLIRSKWVPCLEFSKVGFVFREHNSSPGYYDGRYWTMWKLPMFGCTDATQVLSEVEEVKKEYPDAYVRVIGFDNLRQVQCVSFIAFRPPGWE

SEQ ID NO: 10770 - protein, 239 aa, Eriobotrya japonica
MGGGRVQLKRIENKINRQVTFSKRRTGLLKKAHEISVLCDAQVAVVVFSNKGKLFEYATDSCMEQILERYERYSYAERQLVEPEFESQGNWTFEYCRLKAKVEVLQRNHRHYLGEDLDSLTLKEIQNLEQQLDTALKQIRLRKNQLMHESISELQRKRKAIQEENNLLAKKIKEKEKAAAQPQVQDWEQQNIGLDLLPQPLPCLNNGGTQQDEFLQVRRNQLDLTLEPLYSCHLGCFAA

SEQ ID NO: 10771 - protein, 431 aa, Burkholderia fungorum LB400
MLPVAVAGEGIEIIDSTGKRYIDASGGAAVSCLGHSNQRVIDAIKRQSQQLPYAHTSFFTTEPAEALADRLVASAPQGLEHVYFVSGGSEAIEAALKLARQYFVEKGEPRRRHFIARRQSYHGNTLGALAIGGNAWRREPFLPILIEAHHVSPCYAYREQRADETEEAFAQRLADELERKILELGADTVAAFIAETVVGATAGAVPPVREYFRKIRAVCDRYGVLLILDEIMSGMGRTGYLYACEEDGVAPDILTIAKGLGAGYQPIGATLVSERIYQAIVGGSGFFQHGHTYIGHATACAAALEVQRVIEEDNLLPNVLARGEQLRVRLREHYAQHPHIGDVRGRGLFVGVELVRDRAGKTPFDAALKLHAAIRREAFARGLMVYPMGGTVDGKIGDHVLLAPPFICTARDIDEIVSRLTDAIDGALAAV

SEQ ID NO: 10772 - protein, 337 aa, Aspergillus nidulans FGSC A4
MSISSTSPPYPLHPSVKDLLDPEYVAFYNAHVIDKQQVHLQPVETSRTSGILIPGGGPLVDVGKTVDITIKRRATEGPEILLRAFTPIGEAPEGGWPVMLYFHGGGWVLGNIDTENVVCTNLCSRGGCVVVTVDYRLAPENPWPAAVHDCWESFLWLLSDGPANLNINISKIATGGSSAGGNLAAIITHKALTLSPPVRFLAQLLSVPVMDNTATVSNNESYRRYEFVPALPAAKMLWYRNHYLPNEKDWSHPEASPLFYTGDWSALPRALIMVGELDVLRSEGEQYAEKLKQAEVEVDLQVMKGMPHPFLAMDGVLKEGKRSITLMCDLLKEVFSS

SEQ ID NO: 10773 - protein, 497 aa, Pseudomonas aeruginosa UCBPP-PA14
MIDGLLRSLGLDPNAFRDGELAVHTPIDGSRLAAVPLEGRAAVAAKVERAEQAFRAWRQVPAPRRGELVRLFGEELRRHKAELGELVSWEAGKITQEGLGEVQEMIDICDFAVGLSRQLYGLTIASERPGHHMRETWHPLGVVGVISAFNFPVAVWSWNTALALVCGNSVVWKPSEKTPLTALACQALFERAARAFGGDAPAHLSQLLIGDREAGEALVDDRRVALVSATGSTRMGREVAPRVAARFARCILELGGNNAMILAPSADLDLAVRGILFGAVGTAGQRCTTLRRLIAHESVKDEIVERLKAAYSRVRIGHPLEGNLVGPLIDERSYLAMQDALARAREEGGRVFGGERQLQERYPDAYYVSPAIVEMPGQTEVVRTETFAPILYVVGYRDFDEALRLNNEVPQGLSSCIFTTDLREAELFQGAAGSDCGIANVNIGTSGAEIGGAFGGEKETGGGRESGSDAWKAYMRRQTNTVNYSRELPLAQGITFD

SEQ ID NO: 10774 - protein, 144 aa, Clostridium perfringens str. 13
MLDQKTIDIIKSTVPVLKSNGLEITKTFYKNMFEQNPEVKPLFNMNKQESEEQPKALAMAILAVAQNIDNLEAIKPVVNRIGVIHCNAKVQPEHYPIVGKHLLGAIKEVLGDGATEDIINAWAKTYGVIAEVFINNEKEMYASR

SEQ ID NO: 10775 - protein, 318 aa, Ralstonia eutropha JMP134
MAIDPQLLAYYRRLAEQYGALPVPVDARARRERFAEVAASSVVPDPAGTTWEDLTLALEGRSLTARLFRPVADAPSRLIVYFHGGGWVVGSHETHHTVAALLAADTGCAVASVDYRLAPEYAFPAPCDDAVDAVRWFAVQRASLGFDTGFLAVAGDSAGGHLAALAAQQVNTEARQQVVVAQLLVYPVTAPVLSSESYRAFADGPGLTRDEMAWFWTQFIGAESLARGAQHEDLRIHLMAQAPKVQPPATAIVVAANDVLRDDGLAYADFLVRHDATVVTIEASGMTHGFARLQPDAPRAREWMQRAAQAFASLFDDV

SEQ ID NO: 10776 - protein, 320 aa, Vibrio vulnificus CMCP6
MIKKIGVLTSGGDAPGMNAAIRGVVRTALGAGLEVYGIYDGYLGLYEGRIKQLDRSSVSDVINRGGTFLGSARFPEFKEVAVREKAIENLKAHGIDALVVIGGDGSYMGAKKLTEMGYPCIGLPGTIDNDIAGTDYTIGYLTALNTVIESIDRLRDTSSSHQRISIVEIMGRHCGDLTLMSAIAGGCEYIITPETGLDKEKLIGNIQDGISKGKKHAIIALTELMMDANELAKEIEAGTGRETRATVLGHIQRGGRPTAFDRVLASRMGNYAVHLLMEGHGGRCVGIVKEQLVHHDIIDAIENMKRPVRNDLFKVAEELF

SEQ ID NO: 10777 - protein, 339 aa, Arabidopsis thaliana
MGEAVEVMFGNGFPEIHKATSPTQTLHSNQQDCHWYEETIDDDLKWSFALNSVLHQGTSEYQNIALLDTKRFGKVLVIDGKMQSAERDEFIYHECLIHPALLFHPNPKTVFIMGGGEGSAAREILKHTTIEKVVMCDIDQEVVDFCRRFLTVNSDAFCNKKLELVIKDAKAELEKREEKFDIIVGDLADPVEGGPCYQLYTKSFYQNILKPKLSPNGIFVTQAGPAGIFTHKEVFTSIYNTMKQVFKYVKAYTAHVPSFADTWGWVMASDHEFDVEVDEMDRRIEERVNGELMYLNAPSFVSAATLNKTISLALEKETEVYSEENARFIHGHGVAYRHI

SEQ ID NO: 10778 - protein, 252 aa, Triticum aestivum
  misc_feature (241)..(241): Xaa can be any naturally occurring amino acid
MMGYQKGVDIEAGTSGGTGTAAPTRGLYPGMTESPELRWALIRKIYVILSLQLLLTAVVAAVVVKVRAIPHFFVSSSAGLGLYIFLIIFPFIVLCPLYFYRQKHPVNLLLLGVFTVAISFAVGMTCAFTSGKVILEAAILTTVVVFSLTAYTFWAAKRGQDFSFLGPFLFASLIMLLVFGFIQILFPMGKLSHMIYGALAALIFSGYIVYDTDNIIKRYTYDEYVWAAVSLYLDVINLFLXALLTLFRAGDS

SEQ ID NO: 10779 - protein, 322 aa, Staphylococcus aureus subsp. aureus MRSA252
MKKIAVLTSGGDSPGMNAAVRAVVRTAIYNEIEVYGVYHGYQGLLNDDIHKLELGSVGDTIQRGGTFLYSARCPEFKEQEVRKVAIENLRKRGIEGLVVIGGDGSYRGAQRISEECKEIQTIGIPGTIDNDINGTDFTIGFDTALNTIIGLVDKIRDTASSHARTFIIEAMGRDCGDLALWAGLSVGAETIVVPEVKTDIKEIADKIEQGIKRGKKHSIVLVAEGCMTAQDCQKELSQFINVDNRVSVLGHVQRGGSPTGADRVLASRLGGYAVDLLMQGETAKGVGIKNNKIVATSFDEIFDGKDHKFDYSLYELANKLSI

SEQ ID NO: 10780 - protein, 549 aa, Triticum aestivum
MAAAATRRAASSLASRCLLARPAASPAAVPSALRRADGARGLLPGLLQRFGTAAAAEEPISPSVQVGETQLLINGKFVDAASGKTFPTVDPRTGEVIARVAEGDAEDVDRAVVAARKAFDEGPWPRMTAYERSRILLRFADLIEKHNDDIAALETWDNGKPYEQAAHIEVPMLARLMRYYAGWTDKIHGLIVPADGPHHVQVLHEPIGVVGQIIPWNFPLLMYGWKVGPALACGNTIVLKTAEQTPLSALYVSKLLHEAGLPEGVLNIVSGFGPTAGAALASHMDVDKIAFTGSTDTGKVILELSARSNLKPVTLELGGKSPFIVMDDADIDQAVELAHFALFFNQGQCCCAGSRTFVHERVYDEFVEKSKARALKRVVGDPFRKGVEQGPQIDDEQFKKILRYIKSGVDSGATLVTGGDKLGDKGYYIQPTIFSDVQDGMKIAQEEIFGPVQSIFKFNDLNEVIKRANASQYGLAAGVFTNNLDTANTLTRALRAGTVWVNCFDIFDAAIPFGGYKMSGIGREKGIDSLKNYLQVKAVVTALKNPAWL

SEQ ID NO: 10781 - protein, 339 aa, Arabidopsis thaliana
MGEAVEVMFGNGFPEIHKATSPTQTLHSNQQDCHWYEETIDDDLKWSFALNSVLHQGTSEYQDIALLDTKRFGKVLVIDGKMQSAERDEFIYHECLIHPALLFHPNPKTVFIMGGGEGSAAREILKHTTIEKVVMCDIDQEVVDFCRRFLTVNSDAFCNKKLELVIKDAKAELEKREEKFDIIVGDLADPVEGGPCYQLYTKSFYQNILKPKLSPNGIFVTQAGPAGIFTHKEVFTSIYSTMKQVFKYVKAYTAHVPSFADTWGWVMASDHEFDVEVDEMDRRIEERVNGELMYLNAPSFVSAATLNKTISLALEKETEVYSEENARFIHGHGVAYRHI

SEQ ID NO: 10782 - protein, 409 aa, Staphylococcus aureus subsp. aureus MRSA252
MSLRDEALEMHKRNQGKLEVKPNVKVTNKEELSLAYSPGVAEPCKDIYEDKRKVYDYTIKGNTVAVITDGTAVLGLGNIGPEASIPVMEGKAVLFKSFAGINGVPIALNTTDTEEIIKTVKLLEPNYGGINLEDISAPRCFEIEERLKKETNIPVFHDDQHGTAIVTMAGLVNALRVVNKDIAKIKVVLNGAGAAGIAIVKLLYAYGVRNMVMCDSRGAIFEGRSYGMNPTKDVVAKWTNKDKIEGSLEEVVKDADVFIGVSVANALSQDMVKSMADNPIIFAMANPNPEIIPDDAKAAGARVVGTGRSDYPNQINNVLAFPGIFRGALEVEATHINEEMKKAAVEAIADLIDSSELNEDYCIPGPFDKRVAPSVARNVAKAAMESGVARIEVDPQDVYDKTMKLTDLQ

SEQ ID NO: 10783 - protein, 488 aa, Aspergillus nidulans FGSC A4
MAQVEVPSTNGSGKSVETRLFINGEFQPSSDGKTFSLIDPFTQNSVAEVSQATEEDTNNAVAAAKAAFPAWRDRSPADRGACLHKLAALIRENNEEFARLEALSTGRPVSRYFDATVSADTFSYFAEAGWTVQGTSSLNTPGHLNMTVKQPYGVVACIIPWNVPMAFFAFKVAPALAAGNTVVLKSSEKAPLTSALAATLIAEAGFPPGVINILSGFGTPAGSTLASHMDVRCLSFTGSSFTGQRIQAAAAASNMKIVHMELGGKSPALIFEDADLENAAQATQFSIQCLSGQTCMANSRIYVQESVADEFLALFKEKFGSAVLGNPLESGTTHGPQVDGLQYERVKSYITIGEQDGKLSMGGDAGNGYFVKPTVFEGVPEDSRIVKEEVFGPVVVINTFKTEEEAIKKANASEFGLYASVFTKDLDRAVRTSKLLEAGTVGVNTTSPNVAKDMPFGGYKMSGVGREGFMHSLDNFLETKTILIKMSS

SEQ ID NO: 10784 - protein, 339 aa, Arabidopsis thaliana
MGEAVEVMFGNGFPEILKATSPTQTLHSNQQDCHWYEETIDDDLKWSFALNSVLHQGTSEYQDIALLDTKRFGKVLVIDGKMQSAERDEFIYHECLIHPALLFHPNPKTVFIMGGGEGSAAREILKHTTIEKVVMCDIDQEVVDFCRRFLTVNSDAFCNKKLELVIKDAKAELEKREEKFDIIVGDLADPVEGGPCYQLYTKSFYQNILKPKLSPNGIFVTQAGPAGIFTHKEVFTSIYNTMKQVFKYVKAYTAHVPSLADTWGWVMASDHEFDVEVDEMDRRIEERVNGELMYLNAPSFVSAATLNKTISLALEKETEVYSEENARFIHGHGVAYRHI

SEQ ID NO: 10785 - protein, 112 aa, Bartonella clarridgeiae
ANETCLKMLQEIGTVQKIPEFIARAKDKNDRFRLMGFGHRVYKNYDPRAKIMQQTCHEVLKELNIQDDPLLDIAMELEKIALNDEYFIEKKLYPNVDFYSGITLKALGFPTE

SEQ ID NO: 10786 - protein, 435 aa, Burkholderia cepacia R18194
MSRQQQAQELQQQWESDPRWKGIKRSYTAEDVVRLRGSIPIEHTLAKRGAEKLWSLVNNEPFVNALGALTGNQAMQQVKAGLKAIYLSGWQVAGDANVAGEMYPDQSLYPANSVPLVVKRINNTLTRADQIQWSEGKNPGDEGYVDFFAPIVADAEAGFGGVLNAFELMKAMIESGASGVHFEDQLASVKKCGHMGGKVLVPTREAVAKLSAARLAADVMGTSTLLVARTDAEAADLITSDVDDNDKPFLTGERTVEGFFRTKPGIEQAISRGLAYAPYADLVWCETGKPDLEYAKKFAEAIHKQFPGKMLSYNCSPSFNWKKNLDDATIAKFQKELGAMGYKFQFITLAGFHALNYSMFNLAHGYARTQMSAFVELQQAEFAAADKGFTAVKHQREVGTGYFDAVTQTVEREASTTALHGSTEDEQFFDGKKVA

SEQ ID NO: 10787 - protein, 284 aa, Streptococcus agalactiae 2603V/R
MTDTMILNDNHKIPTLGLGTWMIDNDRVAQVVKDAIELGYRHIDTAQAYNNEKGVGVGIKESGITRESLFVTTKIAAEHKDYESATKSIDQSLEALGLDYIDLMIIHSPQPWKEWRETDKHFDQGNLEAWRALEDAQKSGKMKSIGVSNFLEKDLENILKNGHVKPAVNQILAHIGNTPFDLIDYCQSKGIQVEAYSPIAHGQALKSDGIQKMAEKYGVSVAQLCIQYLLQLNLIVLPKASSKEHLQSNLDFDFVISDEDMSILKSLMFDDYGEFSNFPVFSGK

SEQ ID NO: 10788 - protein, 257 aa, Triticum aestivum
  misc_feature (22)..(22): Xaa can be any naturally occurring amino acid
  misc_feature (174)..(174): Xaa can be any naturally occurring amino acid
  misc_feature (233)..(233): Xaa can be any naturally occurring amino acid
MSTTRVKRRVGKYELGRIRFAXNTETGDPVAIKILDKEKLLKHKMVEQIKREIATMKLIKHPNVVRIHEVMGSKTKIYIVLEYVTGGELFDTIVNHGRMREDEARRYFQQLINAVDYCHSRGVYHRDLKPENLLLDSCGNLKVSDFGLSALSQQLKDDGLLHTTCGTPIMLPRXNYVAPDVLEDQGYDGAMADLWSCGVILFVLLAGYLPFEDSNLMALYSSISRAAATFVTXSSFLRPRIQSKILDSNPIGSIAVQ

SEQ ID NO: 10789 - protein, 164 aa, Zea mays
KCGHMAGKVLVAVSEHVNRLVAARLQFDVMGVETVLVARTDAVAATLIQTNVDARDHQFIVGATNPGLRGQSLAAVLSAGMSAGKSGRELQGIEDEWLAAAQLKTFSECVRDAIAGLGVAAQEKQRRLQEWDRATGGYDRCVSNDQARDIAASLGVTSVFWDWD

SEQ ID NO: 10790 - protein, 231 aa, Zea mays
ADHDDDERDQPALHVLPDGDPERWHAQVFRSVDAGSVKRFPRPWERAEMARRHLVGDKNLAVERSIHAAYVAAIRSAERFVYVENQYFIGGSYAWPSYRNGGACNLVPMEIALKVASKVRAGEPFAAYVVLPMWPEGNPGSGPAQEILFWQNQTMEMMYSVVAAALEGKGGHPQEHLNFYCLGNREPAEDAGDGNKWAPADPLDDATTSSAAVRDCHCSGPRRSSFIQSFH

SEQ ID NO: 10791 - protein, 278 aa, Zea mays
PRVRYFWDVLLDADLESDILGWQYISGSLPDGHELSRLDNPEVQCQKYDPDGEYVRTWIPELARMPTEWIHSPWAAPNSILQVAGVELGFNYPKPIVELHMARECLDDAISTMWQLDTAAKLAELDGEVVDDNLNNIRNFDIPKVVLNKKLSPSTSSMEHRVLSTNGKDEKSQPTEVKALYKQIIRDDMMNDSNMDDTCSTANLKVTRKRSSSDSAFNVPSCSSSLVMESRIHHNEPSSVLYSGYFQKTADRDGTSKVEDNDSEDSGTSISRPSKKAA

SEQ ID NO: 10792 - protein, 460 aa, Yarrowia lipolytica
MCVDSCVQRSSLPHLSRPPGNLHKIINSDIYIYIKPHAPTPLLVAFAPTPHPSTTTSPFGQGLHQAHRQRVASLPTYGKTTTFNLPDNRPIKTVHCPSCEHVCRPQTQDAEAQKLQEAVTQRRRRSGAPGNSFPSAITALHPRQTHAPRERPSARQPDKPNGNRWELGVEFKIDIRAQDLRTIQELGAGNGGSVSRVEHIPTGAVMAKKVIHIGGKEAVRRQILRELHIMHECDSPYIVSFYGAFINESSGDVVMCMEFMDCGHLDRIYKKAGPLTEEIVGHITVAVVEGLTYLYNEHRIVHRDVKPSNILVNSHGQIKLCDFGVSGELINSIADTFVGTSTYMSPERIQGGNYTVKSDVWSLGISLLELLLGKFPFDMANGAVGPMGILDLLQRIVNEPPPTLPAEDTRFSPVCRRFVDRCLVKEPERPSPQQLHPTMPFIITSRAKQVDMKAWAMSVQ

SEQ ID NO: 10793 - protein, 271 aa, Pseudanabaena sp. PCC 7409
MNEETGIPDDNLLTIEQAIANLQSEDLGLRVYAAWWLGRFRVNVPEAIDLLIAALADEADRTEAGGYPLRRNAARALGKLGDRRAVPALITSLECDDFYVREAVAQSLEMLGDNSCVPYLIELIKNPNPEASADTEPEHPYDAFLEALGTLGAVKAIPHILPFLDHPIPKVQYAAARAMYQLSEPMVADQYGDRLVAALANDDLQLRRTVLSDLGAIGYLSAAEAIGNTMAENSLKLISLKGLLEKQIVLATPPDLTDGAIRVMALMDDLL

SEQ ID NO: 10794 - protein, 480 aa, Gibberella zeae PH-1
MTRNKFSSLRDQLVQGKLLLPGDEGYDQSLERWSRTCVKPAAAVAQPRTAEEVSAVVKFATSNGIKFNVKGGGHSSSQTSSSPSPEGMVLDLSLMRDVSVDADAQTITYAGGCLWKDVDDALWAKGLATVGGTVSHTGVGGLTLHGGYGVLSGLHGLAIDNMIACQVVLADGSIVTASASENPDLFWALRGAGSSFGVVTQFTSKAHPQGDIWGGMVLFSPDKLPAIIDFTNTWGATNDGRQILLVAFGHAPPGPDPNAPRPPVVVVRMAQVGDNPSEEGPKYFAPILEMEALMQEIGPMPYPVINQVADGQVMHGSRYLFGGSNFTLPMKLSTAETIRNRFHEFTERTPDATESVVLIECIPNQKIREIPVESTAFNSRGKYFIIGFMYKYEDESLDTEIRQFNRTFQTEVRKLGYNDETLADGIGNYLNYANTGNISAEEAFGSHSKRLVTLKKKYDPENVFDKLWKLVGKVEDNWIA

SEQ ID NO: 10795 - protein, 331 aa, Thinopyrum intermedium
MKTFLVFCLLAVAATSAIAEMESNIIISFLKPWLQQPLPPQQTLPQQQQRPIQQQPQPYPQIPFPPQQPPFSQQQQPSFSQQQQPSFSQQQQPPFSQQQQPSFSQQQQPPFSQQQQSPFSQQQPPVSQQQPPFLQQQQPVLPQQPPFLQQQQLVLPQQQIPFVHPSVLQQLNPCKVFLQQLCSPVAMPQRLARSQMLQQSSCHVIQQQCCQQLPQIPQQSRYEAIRAIIYSIILQEQQQVQGSIQPQQQQPQQLGQCVSQPQQQSQQQLGQQPQQQQLAQVTFLQPHQIAQLEVMTSIALRTLPTMCSVNVPLYRTTTSVPFGVGTGVGAY

SEQ ID NO: 10796 - protein, 351 aa, Clostridium beijerinckii
MKGFAMLGINKLGWIEKERPVAGSYDAIVRPLAVSPCTSDIHTVFEGALGDRKNMILGHEAVGEVVEVGSEVKDFKPGDRVIVPCTTPDWRSLEVQAGFQQHSNGMLAGWKFSNFKDGVFGEYFHVNDADMNLAILPKDMPLENAVMITDMMTTGFHGAELADIEMGSSVVVIGIGAVGLMGIAGAKLRGAGRIIGVGSRPICVEAAKFYGATDILNYKNGHIEDQVMKLTNGKGVDRVIMAGGGSETLSQAVKMVKPGGIISNINYHGSGDALLIPRVEWGCGMAHKTIKGGLCPGGRLRAERLRDMVVYNRVDLSKLVTHVYHGFDHIEEALLLMKDKPKDLIKAVVIL

SEQ ID NO: 10797 - protein, 126 aa, Zea mays
YNHVLQVDYACTPEEVQQHFQACGTVNRVTILTDKFGQPKGFAYVEFLEQEGVQEALNLNESELHGRQIKVAPKRTNVPGMKQRPPRGYNPYHGYPYRSYGAPYFPPYGYGRAPRFRRPMRYRPYF

SEQ ID NO: 10798 - protein, 338 aa, Thinopyrum intermedium
MESNIIISFLKPWLQQPLPPQQTLPQQQQRPIQQQPQPYPQIPFPPQQPPFSQQQQPSFSRQQQPSFSQQQQPSFSQQQQPPFSQQQQPSFSQQQQPAFSQQQQPPFSQQQPPVSQQQQPVLPQQPPFSQQQQPVLPQQPPFSQQQQPVLPQQQIPFVHPSVLQQLNPCKVFLQQLCSPVAMMPQRLDRSQMLQQSSCHVMQQQCCQQLPQIPEQSRYEAIRAIIYSIILQEQQQGQGSIESQQQQPQQSGQGVSQPQQQSQLGQCAFQQPQLQQLGQQPQQQQAAHGTFLQPHQIAQLEVMTSIALRTLPTMCSVNVPLYGTTTSVPFGVGTGVSAY

SEQ ID NO: 10799 - protein, 293 aa, Hordeum vulgare subsp. spontaneum
MSPTLSLKLKKSSHTPQSSVSSSTMLRLFKKEAACQSPSTLPVAMDMGLEVSSSSPSSSSVSSSPEHAARRASPAKRPAGRTKFRETRHPVYRGVRRRGNTERWVCEVRVPGKRGARLWLGTYATAEVAARANDAAMLALGGRSAACLNFADSAWLLAVPSALSDLADVRRAAVEAVADFQRREAADGSLAIAVPKEASSGAPSLSPSSGSDSAGSTGTSEPSANGVFEGPVVMDSEMFRLDLFPEMDLGSYYMSLAEALLMDPPPTATIIHAYEDNGDGGADVRLWSYSVDM

SEQ ID NO: 10800 - protein, 191 aa, Paracoccidioides brasiliensis
MAEIRRKLVIVGDGACGKTCLLIVFSKGTFPEVYVPTVFENYVADVEVDGKHVELALWDTAGQEDYDRLRPLSYPDSHVILICFAIDSPDSLDNVQEKWISEVLHFCQGHPIILVGCKKDLRDDPRTIEELRKTSQKPVTTEQGEEVRKKIGAYKYLECSARTNDGVREVFESATRAALLAKKEKKKCKIL

SEQ ID NO: 10801 - protein, 177 aa, Lemna gibba
MASSMMASTAAVARAGPAQSSMVAPFNACRSSVAFPATRKANNNLSTLPGNGGRVSCMQVWPPEGLKKFETLSYLPPLSVEDLAKEVDYLLRNDWVPCIEFSKEGFVYRENHASPGYYDGRYWTMWKLPMFGCTDASQVIAEVEEAKKAYPEYFVRIIGFDNKRQVQCISFIAYKPT

SEQ ID NO: 10802 - protein, 110 aa, Triticum aestivum
MDSQFGAMERGGSRQRRSPVSARPNTAKRHLQQQRANAADKKVVIPNYFGVEAFFVLACLTVSLLILPLVLPPLPPPPSLLLFVPVCLLILLMVLAFMPTDVRSMATSYL

SEQ ID NO: 10803 - protein, 379 aa, Bdellovibrio bacteriovorus HD100
MAEVNIYEGALDKGLEGVVACTTKVSFIVGDSLNFRGYTIDDLAANSTFEEVTYLLWNDKLPNAQELAAFSTQLRNEMALSPDFIKVLKAIPTNVHPMGWLRTAVSLMAHWDSDANDNGAEANLRKSVRLTAKMGTLLCAFDAIRKGKEPVAPKADKSMAWNMMYMLGGGAEPKAEHVKVMDTCLILHADHELNCSAFATRVTASSLSDLHSAIVSAIGALKGPLHGGANEQVILMLQKIGTMEKAQQFVKDALAAKEKVMGIGHRVYKNGDPRARILRGMSDKLTKDAGIHHMYEMSTLIDDTMFNEKGLMPNVDFYSATVYFSMGIPTDLFTPIFAASRISGWCAHAFEQYANNRIYRPRGKWAGKEGLKWTPANQR

SEQ ID NO: 10804 - protein, 421 aa, Spinacia oleracea
MTDRLAMASFTTTTAAAASRLLPSSSSSISRLSLSSSSSSSSSLKCLRSSPLVSHLFLRQRGGSAYVTKTRFSTKCYASDPAQLKNAREDIKELLQSKFCHPIMVRLGWHDAGTYNKDIKEWPQRGGANGSLSFDVELKHGANAGLVNALKLLQPIKDKYSGVTYADLFQLASATAIEEAGGPTIPMKYGRVDATGPEQCPEEGRLPDAGPPSPAQHLRDVFYRMGLDDKDIVALSGAHTLGRSRPERSGWGKPETKYTKDGPGAPGGQSWTAEWLKFDNSYFKDIKEKRDADLLVLPTDAALFEDPSFKVYAEKYAADQEAFFKDYAEAHAKLSNQGAKFDPAEGITLNGTPAGAAPEKFVAAKYSSNKRSELSDSMKEKIRAEYEGFGGSPNKPLPTNYFLNIMIVIGVLAVLSYLAGN

SEQ ID NO: 10805 - protein, 201 aa, Zea mays
  misc_feature (152)..(152): Xaa can be any naturally occurring amino acid
  misc_feature (161)..(161): Xaa can be any naturally occurring amino acid
  misc_feature (170)..(170): Xaa can be any naturally occurring amino acid
  misc_feature (173)..(173): Xaa can be any naturally occurring amino acid
  misc_feature (182)..(182): Xaa can be any naturally occurring amino acid
  misc_feature (185)..(185): Xaa can be any naturally occurring amino acid
  misc_feature (196)..(196): Xaa can be any naturally occurring amino acid
MKPPSLVHCFKLLVLLALARLTMHVPDEDMLSPLGALRLDGHFSFHDVSAMARDFGNQCSFLPAAVLHPGSVSDIAATVRHVFSLGEGSPLTVAARGHGHSLMGQSQAAQGIVVRMESLRGARLQVHDGFVDAPGGELWINVLRETLKHGLXAPQSWTDYXHLTVGGTCXNAXVSGQAFRHXPQXRGDVVTCSPEXNSDLF

SEQ ID NO: 10806 - protein, 203 aa, Gibberella zeae PH-1
MAQAGGSYNNPLKKFKLVFLGEQSVGKTSLITRFMYDSFDNMYQATIGIDFLSKDRTVRLQLWDTAGQERFRSLIPSYIRDSSVAVVVYDISNAKSFQNTKKWIDDVRAERGNDVIIVLVGNKTDLNEKREVTTQQGEEEAKKNNLMFVETSAKLGHNVKNLFKRIAQALPGMEGSDAAAQASNQMIDVKTNNTQQSQEGCAC

SEQ ID NO: 10807 - protein, 339 aa, Arabidopsis thaliana
MGEAVEVMFGNGFPEILKATSPTQTLHSNQQDCHWYEETIDDDLKWSFALNSVLHQGTSEYQDIALLDTKRFGKVLVIDGKMQSAERDEFIYHECLIHPALLFHPNPKTVFIMGGGEGSAAREILKHTTIEKVVMCDIDQEVVDFCRRFLTVNSDAFCNKKLELVIKDAKAELEKREEKFDIIVGDLADPVEGGPCYQLYTKSFYQNILKPKLSPNGIFVTQAGPAGIFTHKEVFTSIYNTMKQVFKYVKAYTAHVPSFADTWGWVMASDHEFDVEVDEMDRRIEERVNGELMYLNAPSFVSAATLNKTISLALEKETEVYSEENARFIHGHGVAYRHI

SEQ ID NO: 10808 - protein, 112 aa, Bartonella sp. sh6833ga
ANEACLKMLQEIGSVKRIPEFIARAKDKNDPFRLMGFGHRVYKNYDPRAKIMQKTCHEVLKELNIQDDPLLDIAIELEKIALNDEYFGEKKLYPNVDFYSGITLKALGFPTE

SEQ ID NO: 10809 - protein, 479 aa, Caulobacter crescentus CB15
MREYTKFYIDGAWVDPAAPNTLDVINPATEEVCGVISMGSEADVDKAVRAARKAFASFSQTSREERIDILERIIAEYQKRFEDMAKAITEEMGAPAWLAQRAQAAMGIGHVQTAAAVLKGYKFEEDRGTTRIVKEPIGVCAFITPWNWPVNQIACKVGPAIATGCTMVLKPSEIAPFSGYIWTEIMHAAGVPAGVFNLVNGDGPTVGAALSRHPEVDMVSFTGSTRAGIEVAKNAAPTVKRVHQELGGKSPNIILDDADFSRAVAGGVASVMMNSGQSCNAPTRMLVPGARMDEVIAIAKAAAESHTVGDPNGNHKMGPVVSETQWNKIQGLIQKGIDEGATLVTGGVGRPEGLDKGYYVKPTVFANVTNEMTIAKEEIFGPVVSILGYDTVDEAVTVGNDTEYGLAAYVSGGDQDEVRKVASRLRAGQVTLNGAGPDLMAPFGGYKMSGNGREWGDHAFGEFLETKAILGYSAKVAAE

SEQ ID NO: 10810 - protein, 339 aa, Arabis gemmifera
MGEAVEIMFGNGFPEIHKDTSPIQTLHSNQQDCHWYEETIDDDLKWSFALNSVLHQGTSEYQDIALLDTKRFGKVLVIDGKMQSAERDEFIYHECLIHPALLFHPNPKTVFIMGGGEGSAAREILKHTTIEKVVMCDIDQEVVDFCRRFLTVNSDAFCNKKLELVIKDAKAELEKREEKFDIIVGDLADPVEGGPCYQLYTKSFYQNILKPKLSPNGIFVTQAGPAGIFTHKEVFTSIYNTMKQVFKYVKAYTAHVPSFADTWGWVMASDHEFDVEVDEMDRRIEERVKGELMYLNAPSFVSAATLNKTISLALEKETEVYSEENARFIHGHGVAYRHI

SEQ ID NO: 10811 - protein, 418 aa, Mycobacterium bovis AF2122/97
MASGSGLCKTTSNFIWGQLLLLGEGIPDPGDIFNTGSSLFKQISDKMGLAIPGTNWIGQAAEAYLNQNIAQQLRAQVMGDLDKLTGNMISNQAKYVSDTRDVLRAMKKMIDGVYKVCKGLEKIPLLGHLWSWELAIPMSGIAMAVVGGALLYLTIMTLMNATNLRGILGRLIEMLTTLPKFPGLPGLPSLPDIIDGLWPPKLPDIPIPGLPDIPGLPDFKWPPTPGSPLFPDLPSFPGFPGFPSLPGFPGLPGFPEFPAIPGFPALPGLPSIPNLFPGLPGLGDLLPGVGDLGKLPTWTELAALPDFLGGFAGLPSLGFGNLLSFASLPTVGQVTATMGQLQQLVAAGGGPSQLASMGSQQAQLISSQAQQGGQQHATLVSDKKEDEEGAAAGVAEAERAPIDAGTAASQRGQEGTVL

SEQ ID NO: 10812 - protein, 484 aa, Bordetella bronchiseptica RB50
MENLGYPARLELYVAGQWRGVEGRRTQVVVNPSTQQPLGELPLASVEDIDDALAAADQAFGDWARTTAWERADILQRAAALIEARRDRLAVVLTLENGKPLADSHGELDRVVETILWCAEEGKRTYGRVLPARAQRLSQSSLKRPVGPVAAFVPWNFPAVLAARKLAAAMAAGCTVVLKPAEETPAICIELVRAFVDAGTPAGVVNLLYGVPAQVSERLIASPIIRKVSFTGSVAVGRLLASMAAGHLKPATMELGGHAPVVVFDDVDADRVAKMCVGFKYRNAGQVCLSPSRFYVHERIADRFAESFVRHAGLLRVGDGMEEGVQMGPLNNVRRLQAAERLVEQAVGAGASLALGGRRIGQRGYFYPPTVLEGVPDAADILAEEPFCPVAPIMRFGSMDEVIGRANHPSLGLAAYAFTNRMATSAEFAERIEAGWIGINNFVPALADAPIGGMKDSGLGYEGGPEGLDAYLHARFVSQLNVEV

SEQ ID NO: 10813 - protein, 361 aa, Zea mays
AHTPDAFAPRIPLAGGRLYQPGRCWEDVFDAISNARHLIYITGWSVYTEITLLRDGSRPRPGGEATLGELLKRKASEGVRVLMLVWDDRTSVESLGMKWGFMSTHDAETAEYFRGSGVHCVLCPRNPDAGSSAVMGAQIAYMITHHQKIVVVDHEMPAKRSDRRRILSFVGGLDLCDGRYDTQFHSLFRTLDTAHHKDFHQPNLAGASIDNGGPREPWHDIHSKIEGPAAWDVLYNFEQRWRKQGGGIDLLVNLKAMADLIIPPSPVMFPEDQDSWNVQLFRSIDGGACFGFPSTPEAAAQSGLVSGKNNVLDRSIHDAYIHAIRRAKHFIYIENQYFLGSSFAWKADGIKPEEIEALHLV

SEQ ID NO: 10814 - protein, 202 aa, Neurospora crassa
MSDSPQSNSKDVEQGAPSPGEEPQMNDPQDPHSSGLNQYEFEVKEQDRWLPIANVARIMKNALPENAKIAKEAKECMQECVSEFISFITSEASEKCQQEKRKTVNGEDILFAMTSLGFENYAEALKIYLSKYREQQNQTNRSENQQNRPSSQGYGAPQGQNQPGQGGFSSNDLGGQQESGDASGYNLYGAQTGHNGGGAEGY

SEQ ID NO: 10815 - protein, 321 aa, Thinopyrum intermedium
MESNIIISFLEPWLQQPLPPQQTLPQQQQRPIQQQPQPYPQIPFPPQQPPFSQQQQPPFSQQQQPPFSQQQQPSFSQQQQPPFSQQQQPPFSQQQPPVSQQQQPVLLQQPPFSQQQQPVLPQQPPFSQQQQPVLPQQQIPFVHPSVLQQLNPCKVFLQQLCSPVAMPQRLARSQMLQQSSCHVMQQQRCQQLLQIPEQSRYEAIRAIIYSIILQEQQQGQGSIESQQQQPQQSGQGVSQPQQQSQLGQCAFQQPQLQQLGQQPQQQLAAHGTFLQPHQIAQLEVMTSIALRTLPTMCSVNVPLYGTTTSVPFRVGTGVSAY

SEQ ID NO: 10816 - protein, 125 aa, Triticum aestivum
  misc_feature (13)..(13): Xaa can be any naturally occurring amino acid
  misc_feature (20)..(20): Xaa can be any naturally occurring amino acid
  misc_feature (43)..(43): Xaa can be any naturally occurring amino acid
  misc_feature (52)..(52): Xaa can be any naturally occurring amino acid
YFHLPIREASRTXKIGLSIXKKKCRQYGIPRWPHRKLKSLDSXIHDLEYVIXDETERDGVKQEDHMQDEKENQDAIEALAKRKRMLETEKATIQQKPTLDLMAETKQFRQYVFKRKYRAKTLVSE

SEQ ID NO: 10817 - protein, 165 aa, Triticum timopheevii subsp. armeniacum
VMASSATTVAPFQGLKSTAGLPVSRRSSGSLGRVSNGGRIRCMQVWPIEGIKKFETLSYLPPLSTEALLKQVDYLIRSKWVPCLEFSKVGFVFREHNSSPGYYDGRYWTMWKLPMFGCTDATQVLSEVEEVKKEYPDAYVRVIGFDNLRQVQCVSFIAFRPPGCE

SEQ ID NO: 10818 - protein, 174 aa, Gloeobacter violaceus PCC 7421
MGKGVTLWFTGLSGAGKSTISGIVAKKLQEIGRNVEVLDGDEVRLNLSAGLSFSKADRDTNVRRIGYVCRLLSRNGVIAISAAISPYRNTREELRANIIDFLEIFVDCPLDVCIERDVKGLYAKALKGEIPAFTGVSDPYEAPANPDLTILTNTESKDESANRVVQLLYERGYL

SEQ ID NO: 10819 - protein, 513 aa, Glycine max
MHTLLRSTLRTKTASSLAYAVVSRSAHENLLQAPLLSRSNSTEASLAKDNSSNDVKNGQGYKGHSMLAPFTAGWQSSDLHPLIIEKSEGSYVYDINGKKYLDALAGLWATSLGGSEPRLVDAAVAQLKKLPFYHSFWNRTTLPSLDLAKELLEMFTARKMGKAFFVNSGSEANDTQVKLVWYYNNALGRPDKKKFIARAKSYHGSTLIAASLSGLPALHQKFDLPAPFVLHTDCPHYWRYHLPGETEEEFSTRLANNLEQLILKEGPETIAAFIAEPVMGAGGVIPPPSTYFEKVQAVVKKYDILFIADEVICAFGRLGTMFGCDKYNIKPDLVSLAKALSSAYLPIGAVLVSPEISEVIHDQSNKLGSFSHGFTYSGHPAACAVAIEALKIYKERNIVDQVNKIAPRFQDGIKAFSDSPIIGEIRGTGLILGTEFTDNKSPNDPFPPEWGIGAYFGAQCEKHGMLVRVAGDNIMMSPPYIISPGEVEELISIYGKALKETEKKVQELKSQRK

SEQ ID NO: 10820 - protein, 165 aa, Triticum aestivum
VMASSATTVAPFQGLKSTAGLPVSRRSSGSLGRVSNGGRIRCMQVWPIEGIKKFETLSYLPPLSTEALLKQVDYLIRSKWVPCLEFSKVGFVFREHNSSPGYYDGRYWTMWKLPMFGCTDATQVLNEVEEVKKEYPDAYVRVIGFDNLRQVQCVSFIAFRPPGCE

SEQ ID NO: 10821 - protein, 112 aa, Triticum aestivum
  misc_feature (91)..(91): Xaa can be any naturally occurring amino acid
  misc_feature (102)..(102): Xaa can be any naturally occurring amino acid
MAPTVMASSATSVAPFQGLKSTAGLPVSRRSNGASLGSVSNGGRIRCMQVWPIEGIKKFETLSYLPPLSTEALLKQVDYLIRSKWVPCLEXFNKVGFIFREXHNASPGYRWG

SEQ ID NO: 10822 - protein, 335 aa, Prochlorococcus marinus subsp. marinus str. CCMP1375
MTSLLDQLSSMTVVVADTGDLEAIRTFKPQDATTNPSLILAAAQIPAYQNLIDKSLQASRQRVGSFASAKEVVDEALDEVCVTFGKEILKIIPGRVSTEVDARLSFNTQATINKARKIIDLYKKVDISKERVLIKVASTWEGIKAAEVLESEGIHCNLTLLFGFSQAVACAEAGVTLISPFVGRILDWYKAETGKDSYAGEEDPGVVSVTKIFNYYKSNNYKTEVMGASFRNIDEILELAGCDLLTIAPKFLEQLENSDSKLTRKLDSLKPLPSETKIHLEEYDFRNMLKLDRMATEKLEEGIINFSKAIEQLEQLLSKRLSYIESGSNAELSIA

SEQ ID NO: 10823 - protein, 165 aa, Secale cereale
MMASSATTVAPFQGLKSTAGLPVSRRSSGSLGNVSNGGRIRCMQVWPIEGIKKFETLSYLPPLSTEALLKQVDYLIRSKWVPCLEFSKVGFVFREHNSSPGYYDGRYWTMWKLPMFGCTDATQVLNEVEEVKKEYPDAYVRVIGFDNLRQVQCVSFIAFRPPGCE

SEQ ID NO: 10824 - protein, 277 aa, Brassica napus
STHASGTPYTSCGTPNYVAPEVLNDGGYDGATADMWSCGVILYVLLAGYLPFDDSNLMNLYKKISSGEFNCPPWLSLGAMKLITRILDPNPMTRVTPQEVFEDEWFKKDYKPPVFEEKDDSNMDDVDAVFKDSEEHHVTEKKEEQPAAINAFEIISMSRGLNLENLFDPEQEFKRETRITLRGGANEIIDKIEEAAKPLGFDVQKKNYKMRLENVKAGRKGNLNVATEIFQVAPSLHMVQVSKSKGDTLEFHKFYKKLSNSLENVVWTNNEVKKAGK

SEQ ID NO: 10825 - protein, 163 aa, Zea mays
MDAVMFGLETPLMAALQHLLDVPDGDAGAGGDSDNKTGGGATRTYVRDARAMAATPADVKELPGAYAFVVDMPGLGTGDIRVQVEDERVLVVSGERRREEREDAKYLRMERRMGKFMRKFVLPDNADVDKVAAVCRDGVLTVTVEKLPPPEPKKPKTIEVKVA

SEQ ID NO: 10826 - protein, 59 aa, Brassica napus
EKFARSLRLSLREVKLSEGYYVMDPEQAVEMVDENTICVAAILGSTLNGEFEDVKLLNE

SEQ ID NO: 10827 - protein, 328 aa, Zea mays
HASGKIGPAIATGNTVIIKTAEQTPLSGLYASKLIVEAGFPPGVINVISGFGRTAGAAISSHMDIDKVAFTGSTLVGRMILQAAAKSNLKKVTLELGGKSPNIVFDDADIDNAISWSNFGIFFNHGQCCCAGSRLLVQEGIYDKFIERFKERAAKNQLGNPFAKDTFQGPQVSQLQFDRIMEYINHGKKEGATVALGGERHGTEGYFIQPTVFTDVTPNMKIAQEEIFGPVIAVTKFKDEAEAIKIGNSTSYGLAAAVHTKNVNTAIRVSNALKAGTVWINNYNMISYQAPFGGFKESGLGRELGSYALDNYTQVKTVHYRLGDALFG

SEQ ID NO: 10828 - protein, 255 aa, Brassica napus
GDIHGQYQDLLRLFEYGGYPPSANFLFLGDYVDRGKQSLETICLLLAYKIRYPSKIYLLRGNHEDAKINRIYGFYDECKRRFNVRLWKIFTDCFNCLPVAALIDDKILCMHGGLSPELDNLNQIREIQRPTEIPDSGLLCDLLWSDPDQKIEGWADSDRGISCTFGADKVAEFLDKNDLDLICRGHQVVEDGYEFFAKRRLVTIFSAPNYGGEFDNAGALLSVDESLVCSFEIMKPALASSSGHPLKKVPKMGKS

SEQ ID NO: 10829 - protein, 112 aa, Bartonella sp. sh7768ga
ANEACLKMLQEIGSVKKIPEFIARAKDKNDPFRLMGFGHRVYKNYDPRAKIMQKTCHEVLKELNRQDDPLLDIAIELEKIALNDEYFVEKKLYPNVDFYSGITLKALGFPTE

SEQ ID NO: 10830 - protein, 207 aa, Magnaporthe grisea 70-15
MTVMAGGALASRHLPASPRPAGRRAAPSSRRPHSTFVTWRESQLTPAAAEKGEETPLADYKGKVVLVVNTASKCGFTPQYAGLEALYKKITEKHPEDFTILGFPCNQFGGQEPGTDDDIQNFCQVNYGVTFPIMKKVDVNGDNADPLFKWLKEEMPGIMGLKRVKWNFEKFLIGRDGKVKGRWASTTKPESLEKDILKEIEAPKPSI

SEQ ID NO: 10831 - protein, 459 aa, Pseudomonas putida KT2440
MSTHSSTVQNDLAALIHPNTNLAQHREVGPLVIARGDGVRVFDEQGNAYIEAMSGLWSAALGFSEQRLVDAAVEQFKQLPYYHSFSHKTNAPAAALAAKLAALAPGDLNHVFFTNSGSEANDSVVKMVWYVNNALGRPAKKKFISRQQAYHGATVAAASLTGIPSMHRDFDLPAIPVHHLTCPNFYRFARPGESQEAFTVRLANELERYILAEGPETIAAFIGEPVIAAGGVIPPPTGYWAAIQAVCKRYDILVVIDEIITGFGRLGTMFGSQLYGIQPDIMVLSKQLTSSYQPLAAVVVSDAMNDVLVSQSQRLGAFAHGLTCTGHPVATAVALENIRIIEERDLVGHVQHLAPVFQRHLRAFEDHPLVGNVRGVGLMGGIELVADKATRQPFAQPGTLGGYVFKQAHKHGLIIRAIYDTIAFCPPLITTQDDIEAIFSAFERTLADATDWARSQHLL

SEQ ID NO: 10832 - protein, 474 aa, Pseudomonas putida KT2440
MQTKLLINGALVAGEGDHVDVYNPSLGRVLVQTHEASHAQVHAAVQSADAAFEAWSQTPPKDRAALLLTLADRIDAQAAVFARLEADNCGKPFTAVLQDELPAVSDVFRFFAGAVRCLQGSAAGEYIPGHTSMIRRDAVGVVASIAPWNYPLLMAAWKLGPALAGGNTVVLKPSEHTPMSTLKLGELLADIFPAGVVNIVHGRGATVGEPLTSHALVRMVSLTGSVRTGSRIIEGTADSVKRMHMELGGKAPVLIFDDADIDAAVEGIRAFGFYNAGQDCTAACRLYVQKAVYPEFVRKLGEAVSSIKCGLQDDPATEMGPLITQEHLQRVEGFVNRAREQPHIEVVTGGKRAAGAGFFFEPTVLAGTRQEDEVVCREIFGPVVTVSPFEDEAQVLAWANESDYGLASSVWTADVGRAHRLAARLQYGCTWVNTHFMLVSEMPHGGVKLSGYGKDLSMYGLEDYTLVRHVMFKH

SEQ ID NO: 10833 - protein, 407 aa, Moorella thermoacetica ATCC 39073
MSIQERALNLHREWQGKIETRPRVQVRNADDLTMAYTPGVAEPCKEIHKDPNLVDVYTRRWNLVAVVSDGSAVLGLGNIGARAAMPVMEGKSVLFKSFAGVDAFPICIDSQDVDEIVRTVQLLTPTFGGVNLEDIAAPRCFEIERRLKETTDIPIFHDDQHGTAVVVLSAIINACKITKRELSDLKVVINGAGAAGIACGKLLVDVGVSDVILCDSKGIICSKRDDLNAIKKEMLQITNKEDRCGTLADAMEGANCFIGLSVKDAVTPEMVRSMDKDSILFAMANPVPEILPDVARAAGAAVVGTGRSDFPNQVNNVLGFPGIFRGALDVKASDINDAMKIAAAHALADLVGDRLSADFVMPEAFDPRVAPAVAMAVARAAIESGVARDPKDPEWVKRHTEELIARQ

SEQ ID NO: 10834 - protein, 358 aa, Glycine max
MMSCKENEEDDTYLSALTLCFSRIFPAILNAAVDLNLFDIIDKAESSTLSASEIASLLLPNPHPQLANRLERILPVLASYSLLNCSIRTTEDGVRERLYALSPIGQYFASDDDGGSLGPLSSLFHRGYFHVLKDVKDAIMDPNNNDHFQNVHGMPPYQYMKTDEELNKLFNKALAQTGPPAMKMLLKLYKGFEQVSTLVDVGGGVGETLKQIIFEYPSIKGINFDLPQVVQDAPPYPGIEHVEGDMFESVPKGDAILLKLVCHNWLDEDCVKFLRNCHKALPQHGKVIVIDYIIPEVPDSSKISMQTCVADSLMFLVTSGKERTEKEFESLCRNSGFSRFHVACRDSPSVLSVIEFYK

SEQ ID NO: 10835 - protein, 69 aa, Brassica napus
MGGCVSTPKSCVGSKMRSKRRKSRKRRKLQRKRAAGSFDNLDHPPNNLPTPSFRASGEEAWFESNAAFE

SEQ ID NO: 10836 - protein, 459 aa, Oryza sativa
MESSNLGGGGGGGGGGGPPPFLIKTYEMVEDAATNHVVSCGPGGASFVVWNPLDFSRDLLPKYFKHNNFSSFIRQLNTYGFRKIDPERWEFANEDFIRGHTHLLKNIHRRKPVHSHSLQNQINGPLAESERRELEEEINRLKYEKSILVADLQRQNQQQYVINWQMQAMEGRLVAMEQRQKNIVASLCEMLQRRGGAVSSSLLESDHFSKKRRVPKMDLFVDDCAAGEEQKVFQFQGIGTDAPAMPPVLPVTNGEAFDRVELSLVSLEKLFQRANDACTAAEEMYSHGHGGTEPSTAICPEEMNTAPMETGIDLQLPASLHPSSPNTGNAHLHLSTELTESPGFVQSPELPMAEIREDIHVTRYPTQADVNSEIASSTDTSQDGTSETEASHGPTNDVFWERFLTETPRSCLDESERQESPKDDVKAELGCNGFHHREKVDQITEQMGHLASAEQTLHT

SEQ ID NO: 10837 - protein, 467 aa, Streptomyces sp. JP95
MLRDDLTGELVLPSDPGYRLAKQVQNTEYDAISPRAIAYCTSPDDVLACVRHAREAGIPAHVRGAGHSFNGWSTGTGLVIDLSRMNHAAADGPTVSIGAGIQSLDALDALKRHDRQIITGTFPTVGQGGFLSGGGLGWQTRKFGVASDRIVSARVVLADGRAVVASADEHPDLFWALRGGGGGNFGIVTAFELRPVDAPHLTAFETLWSFDDAADVLTAWQSWAAGESDDLGTSLVVLPGMFGPGGRPVVKVWGVHHGAAEELERALDALTDLAGVKPAHRETTATGPYADVMHEALCGSKTVQQCHRTGTGPEAVGHRHPYTRQAYRLTGRPVTRAEAESLLRAWEPDLDAEHYLLCIALGGAANRVGRTETAYVHRDARFLTGYQIATRDPEAVARGPVELDAWADRCAEALAPLATGSYINFPDSRTPPDWEADHYGENAARLRAVKRAYDPDGFFRHGRSIGS

SEQ ID NO: 10838 - protein, 386 aa, Triticum aestivum/Thinopyrum intermedium alien addition line
MESNIIISFLKPWLQQPLPPQQTLPQQLQQPVQQQPQQYPQIPFPPQQPPCSQQQQPPCSHEQQPSFSQQQQPSFSQQQQPPLLQQQQSPFLQQQQPSFPQQQPLVSQQQQPVLPQQPPFSQQQQTVLPQQPPFLQQQQPPFSQQQPPVSQQQQPVLPQQPPFSQQQQPVLPQRPPFSQQRQPVLPQQPPFSQQQQLVLLQQQIPFVHPSVLQQLNPCKVFLQQQCSPVAMPQRLARSQMLQQSSCHVMQQQCCQRLPQIPEQSRYEAIRAIIYSIILQEQQQGQGSVESQQQQPQQSGQGVSQPQQQSQLGQCAFQQPQLQQLGQQLQQQQAPHGTFLQPHQIAQLGVMTSIALRTLPTMCGVNVPLYGTTTSVPFGFGTGVGAY

SEQ ID NO: 10839 - protein, 165 aa, Hordeum vulgare subsp. vulgare
VMASSATTVAPFQGLKSTAGLPVSRRSSASLGSVSNGGRIRCMQVWPIEGIKKFETLSYLPPLTTEALLKQVDYLIRSKWVPCLEFSKVGFVFREHNSSPGYYDGRYWTMWKLPMFGCTDATQVLNEVEEVKKEYPDAYVRIIGFDNLRQVQCVSFIAFRPPGCE

SEQ ID NO: 10840 - protein, 150 aa, Chlamydia trachomatis D/UW-3/CX
MQLTSQAFSYGRPIPKKYSCQGVGISPPLSFSDVPREAKSLVLIVEDPDVPPSVREDGLWIHWIVYNLSPVVSNLAEGAQIFAVQGLNTAGEIGYCPPCPPDAKHRYYFYAYALDVVLSDEEGVTKEQLLEAMDGHIIATAELMGTYEKD

SEQ ID NO: 10841 - protein, 229 aa, Glycine max
  misc_feature (204)..(204): Xaa can be any naturally occurring amino acid
  misc_feature (206)..(206): Xaa can be any naturally occurring amino acid
MWMILLRKRQVVVVVVLSLLQCSVRVDSVFCFSVQVVVHKNSPRETHFRRAGPRQKVYFESEDVYACIVTCGGLCPGVNTVIREIVCGLYHMYGVHKVLGIEGGYRGFYSCNTIPLTPKVVNDIHKRGGTILGTSQGEGGNDTLKIVDSIQDRGINQVYILGGDGTQRGASVIFEEIRRRGLKGSVVGIPESVDNDIPVIDKSXFXFDTAGEEAQRAINAAHVEAESTE

SEQ ID NO: 10842 - protein, 482 aa, Gibberella zeae PH-1
MPPPQLRGFGGGPAVAAPYHQGGFPSHGQPQGGMPGANQYMNANAQLGPFSANGNAFTSGLNSLNTQGFADTGFGSQSARMGFHGPAAALQQSQHGLHQNMLMEHPTIRSQPNKGRIREVWKHNLHEEMAVLRDLVDKYPYIAMDTEFPGVVSRPMGGFRGKSDYHYQCLRTNVDMLKVIQIGLTFFNEDGETPPARPTNDLKLGTAAQKAATNAPFPCSWQFNFKFSITDDMYNEKSIESLQQAGINFELLDRDGIDPHEFASLLIPSGLVCFDNVRWISFHGGYDFGYLTKLLICLPLPNDEVDFDHKMKLYFPTTYDVKHLMKHAIRLHNSGLLTPSDPSSAEILQKFEHKSGLENIAETLKIKRVGSAHQAGSDSLLTGKVFFSMRDKIFAGDIPDEHVGKVWGLGFPDSNSNIISMNQQNNNDGQTNGNAPSTPNTTSVGLATTPGPQGHNGILNTGPMTPGGGGGVFGSFAFGGNR

SEQ ID NO: 10843 - protein, 444 aa, Glycine max
MESKPHVLMQRYELGRLLGQGTFGKVYYARSTITNQSVAIKVIDKDKVMRTGQAEQIKREISVMRLARHPNIIQLFEVLANKSKIYFVIEYAKGGELFNKVAKGKLKEDVAHKYFKQLISAVDYCHSRGVYHRDIKPENILLDENGNLKVSDFGLSALVDSKRQDGLLHTPCGTPAYVAPEVIKRKGYDGYLPFHDPNLIEMYRKISKAELKCPNWFPPEVCELLGMMLNPNPETRIPISTIRENSWFKKGQNIKNKRPVVENNTVSSSSTVLLDQNDCDGLAAEANGESVVPLSINAFDIISRSVGFDLSRFFDESFKKKEARFSSRLPANVIISKLEDIANQLRMKIKKKAAGLLKLESLNEGRKGVLSIDAEIFEVTPCFHMVEVKKSNGDTLEYQKILKEDIRPALQDIVWVWQSDQQLQSQQSEQQQQTDDQQQQQPQS

SEQ ID NO: 10844 - protein, 302 aa, Zea mays
  misc_feature (92)..(92): Xaa can be any naturally occurring amino acid
MVIRSFATTSLIAAFFAIAHLAAWVTPPQAAATAAPPSSPDTASFLRCLGAHLPPQAVYTNASRSYTSVLESSIKNLLFVTPATPTPVAIVXPATRPTSQAAVRCGARHGVGVRPRSGGHDYEGLSYRSLSARRPFAVVDLARLRAVSVDARNRTAWVGSGATLGELYYAIASRSARLGFPGGVGPTVGVGGHLSGGGFGLLLRKHGLAADHVVDAVVVDAAGSLRDRAAMGEDLFWAIRGGGGGSFGVVLSWKLRLVRVPPVVAVSTVHRPRNQSASALLARWQHVAPALPRDAILRVVLQ

SEQ ID NO: 10845 - protein, 293 aa, Hordeum vulgare subsp. spontaneum
MSPTLSLKLKKSSHTPQSSVSSSTKLRLFKKEAACQSPSTLPVAMDMGLEVSSSSPSSSSVSSSPEHAARRASPAKRPAGRTKFRETRHPVYRGVRRRRNTERWVCEVRVPGKRGARLWLGTYATAEVAARANDAAMLALGGRSAACLNFADSAWLLAVPSALSDLADVRRAAVEAVADFQRREAADGSLAIAVAKEASSGAPSLSPSSGSDSAGSTGTSEPSANGVFEGPVVMDSEMFRLDLFPEMDLGSYYMSLAEALLMDPPPTATIIHAYEDNGDGGADVRLWSYSVDM

SEQ ID NO: 10846 - protein, 165 aa, Avena sativa
VTASSATSVAPFQGLKSTAGLPVGRRSNAGLGNVSNGGRIRCMQVWPIEGIKKFETLSYLPPLSEEALLKQIDFLIRSKWVPCLEFSKVGFIFREHGSTPGYYDGRYWTMWKLPMFGCTDASQVIKEVEEVKKEYPDAYVRIIGFDNIRQVQCVSFIAFKPPGCE

SEQ ID NO: 10847 - protein, 584 aa, Glycine max
  misc_feature (24)..(24): Xaa can be any naturally occurring amino acid
  misc_feature (261)..(261): Xaa can be any naturally occurring amino acid
  misc_feature (528)..(528): Xaa can be any naturally occurring amino acid
MCGILAVLGCSDDSRAKRVRVLEXLSRRLKHRGPDWSGLHQHGDCFLAHQRLAIVDPASGDQPLFNEDKSVIVTVNGEIYNHEELRKQLPNHKFRTGCDCDVIAHLYEEHGEDFVDMLDGIFSFVLLDTRDNSFIVARDAIGVTSLYIGWGLDGSVWISSEMKGLNDDCEHFECFPPGHLYSSKERGFRRWYNPPWFSEATPSTPYDPLVLRHTFEQAVIKRLMTDVPFGVLLSGGLDSSLVASVTSRYLANTKAAEQWGXKLHSFCVGLEGSPDLKAAKEVADYLGTVHHEFTFTVQDGIDAIEDVIYHVETYDVTTIRASTPMFLMSRKIKSLGVKWVISGEGSDEIFGGYLYFHKAPNKEEFHRETCRKIKALHQYDCLRANKSTFAWGLEARVPFLDKAFINTAMSIDPESKMIKRDEGRIEKWILRRAFDDEEHPYLPKHILYRQKEQFSDGVGYSWIDGLKAHAAKHVTDKMMLNAGNIYPHNTPTTKEAYYYRMIFERFFPQNSARLTVPGGASVACSTAXKAVEWDAAWSNNLDPSGRAALGVHISAYENQNNNKGVEIEKIIPMDAAPLGVAIQG

SEQ ID NO: 10848 - protein, 165 aa, Aegilops speltoides
VMASSATTVAPFQGLKSTAGLPVSRRSSASLGSVSNGGRIRCMQVWPIEGIKKFETLSYLPPLSTEALLKQVDYLIRSKWVPCLEFSKVGFVFREHNSSPGYYDGRYWTMWKLPMFGCTDATQVLSEVEEVKKEYPDAYVRVIGFDNLRQVQCVSFIAFRPPGCE

SEQ ID NO: 10849 - protein, 435 aa, Arabidopsis thaliana
MEEERRVLFGKYEMGRLLGKGTFAKVYYGKEIIGGECVAIKVINKDQVMKRPGMMEQIKREISIMKLVRHPNIVELKEVMATKTKIFFVMEFVKGGELFCKISKGKLHEDAARRYFQQLISAVDYCHSRGVSHRDLKPENLLLDENGDLKISDFGLSALPEQILQDGLLHTQCGTPAYVAPEVLKKKGYDGAKADIWSCGVVLYVLLAGCLPFQDENLMNMYRKIFRADFEFPPWFSPEARRLISKLLVVDPDRRISIPAIMRTPWLRKNFTPPLAFKIDEPICSQSSKNNEEEEEDGDCENQTEPISPKFFNAFEFISSMSSGFDLSSLFESKRKVQSVFTSRSSATEVMEKIETVTKEMNMKVKRTKDFKVKMEGKTEGRKGRLSMTAEVFEVAPEISVVEFCKSAGDTLEYDRLYEEEVRPALNDIVWSRAR

SEQ ID NO: 10850 - protein, 350 aa, Escherichia coli O157:H7 EDL933
  misc_feature (203)..(203): Xaa can be any naturally occurring amino acid
MRFLLGVLMLMISGSALATIDVLQFKDEAQEQQFRQLTEELRCPKCQNNSIADSNSMIATDLRQKVYELMQEGKSKKEIVDYMVARYGNFVTYDPPLTPLTVLLWVLPVVAIGIGGWVIYARSRRRVRVVPEAFPEQSVPEGKRAGYVVYLPGIVVALIVAGVSYYQTGNYQQVKIWQQATAQAPALLDRALDPKADPLNEEXMSRLALGMRTQLQKNPGDIEGWIMLGRVGMALGNASIATDAYATAYRLDPKNSDATLGYAEALTRSSDPNDNRLGGELLRQLVRTDHSNIRVLSMYAFNAFEQQRFGEAVAAWEMMLKLLPANDTRRAVIERSIAQAMQHLSPQESK

SEQ ID NO: 10851 - protein, 154 aa, Aegilops speltoides
VMASSATTVAPFQGLKSTAGLPVGRRSSGSLGSVSNGGRIRCMQVWPIEGIKKFETLSYLPPLSTEALLKQVDYLIRSKWVPCLEFSKVGFVFREHNSSPGYYDGRYWTMWKLPMFGCTDATQVLSEVEEVKKEYPDAYVRVIGFDNLRQVQCV

SEQ ID NO: 10852 - protein, 487 aa, Salmonella enterica subsp. enterica serovar Dublin
MKKINHWINGQNVAGDDYFQTTNPATGDVLAEVASGGEAKLNQAVAAAKEAFPKWANLPMKKRARLMRRLGDLIDQNVPEIAAMETADTGLPIHQTKNVLIPRASHKFEFFAEVCQQMNGKTYPVDDKMLNYTLVQPVGVCALVSPWNVPFMTATWKVAPCLALGNTAVLKMSELSPLTADRLGELALEAGIPAGVLNVVQGYGATAGDALVRHHDVRGVSFTGGTATGRNIMKNAGLKKYSMELGGNSPVLIFEDAEIERALEAALFTIFLINGERCTAGLSIFIQQSIYPEFVKRFAERANRLRVGDPTDPNTQVGALISQQHWEKVSGYIRLGIEEGATLLAGGAEKPTDLPAHLKGGNFLRPTVLADVDNRMRVQEEIFGPVACLLPFKDEAEGLRLANDVEYGLASYIWTQDVSKVLRLARAIEAGMVFVNTQNVRDLRQPFGGVKASGTGREGGEYSFEVFAEMKNVCISMGDHPIPKWGV

SEQ ID NO: 10853 - protein, 184 aa, Triticum aestivum
PGIYLHSTTLAPPRDGLSATSVVPFPGLSPTAALPVSPAPNGASFGSVSNGGRIRCMQVWPIEGIKKFETLSYLPPLSTEALLKQVDYLIRSKWVPCLEFSKVGFIFREHNTSPGYYDGRYWTMWKLPMFGCTDATQVINEVEEVKKEYPDAYVRIIGFDNMRQVQCVSFIAFKPPACEESGKA

SEQ ID NO: 10854 - protein, 506 aa, Yersinia pseudotuberculosis
MRYAHPGTPEALVSFKAIYGNYIGGEFIEPLGGQYFMNTSPVNGSDIAQFPRSDARDIDAALDAAHQAADAWGKTSVQHRSNLLLQMADRIEANLEYLAVAESWDNGKPIRETLNADLPLAVDHFRYFAGCLRAQEGGVAEIDEKTVAYHFHEPLGVVGQIIPWNFPLLMAAWKLAPALAAGNCVVLKPAEQTPLGITLLLELVGDIFPAGVINVVQGYGREAGEALARSKRIAKIAFTGSTPVGRHIMACAAENIIPCTVELGGKSPNIYFADVMEAEPEFIDKAVEGLVLGFFNQGEVCTCPSRALIHESIYAPFMARVMTKVANIRRGDPLDTETMIGAQASRQQFDKILSYIDIARKEGGEILTGGARATITPALDSGFYIQPTLIKGDNLMRCFQEEIFGPVIGVTTFKDEAEALAIANQTQFGLGAGIWTRDAHLAYRMGRGIKAGRVWTNCYHVYPAHAAFGGYKQSGVGRETHKMALNQYQQTKNLLVSYDTAPLGLF

SEQ ID NO: 10855 - protein, 496 aa, Thlaspi arvense
MDLLYIVAALVIFASLLIAKSKRKPKKNLPPGPPRLPIIGNLHQLGEKPHRAMVELSKTYGPLMSLKLGSVTTVVATSVETVRDVLKTYDLECCSRPYMTYPARITYNLKDLVFSPYDKYWRQVRKLTVVELYTAKRVQSFRHIREEEVASFVRFNKQAASSEETVNLSQKILKMSGSVICRIGFGINLEGSKLENTYQEIIVQAFEVLGSLAAVDYFPVIGTIIDRITGLHAKCEKVFHGIDSFFDQAIQRHIDDPSIKDDIIDLLLKMERGEGSLGEYELTREHTKGILMNILTAGIDTSAQTMTWAMTHLLANPRVMKKLQAEIREKIKNIDEITDDDVEQLDYFKLVLKETFRISPIVPVLVPRVAAKDLKIAGYDVPEKTWIHVNMWAVHMSPSIWKDPETFNPERFIDNQTDFKGLNFELLPFGSGRRMCPGMGMGLAVVHLTLINLLYRFDWKLPNGMKAEELSIEENYGLICVKKLPLEAIPVLTQWT

SEQ ID NO: 10856 - protein, 322 aa, Candida tenuis
MSASIPDIKLSSGHLMPSIGFGCWKLANATAGEQVYQAIKAGYRLFDGAEDYGNEKEVGDGVKRAIDEGLVKREEIFLTSKLWNNYHDPKNVETALNKTLADLKVDYVDLFLIAFPIAFKFVPIEEKYPPGFYCGDGNNFVYEDVPILETWKALEKLVAAGKIKSIGVSNFPGALLLDLLRGATIKPAVLQVEHHPYLQQPKLIEFAQKAGVTITAYSSFGPQSFVEMNQGRALNTPTLFAHDTIKAIAAKYNKTPAEVLLRWAAQRGIAVIPKSNLPERLVQNRSFNTFDLTKEDFEEIAKLDIGLRFNDPWDWDNIPIFV

SEQ ID NO: 10857 - protein, 164 aa, Zea mays
FQAGTGIAELIALEISKQTNAPIEECRKKVWLVDSKGLIVDSRKGSLQPFKKPWAHEHEPLKTLYDAVQSIKPTVLIGTSGVGRTFTKEIIEAMSSFNERPIIFSQKKPTSHSECTAEQAYTWSQGRSIFASGSPFAPVEYEGKTFVPVHAYMIYICCNVVKAN

SEQ ID NO: 10858 - protein, 356 aa, Magnaporthe grisea
MSRANPPSNSSGSRKISFNVSEQYDIQDVVGEGAYGVVCSAIHKPSGQKVAIKKITPFDHSMFCLRTLREMKLLRYFNHENIISILDIQKPRSYETFNEVYLIQELMETDMHRVIRTQDLSDDHCQYFIYQTLRALKAMHSANVLHRDLKPSNLLLNANCDLKVCDFGLARSAASQENNSGFMTEYVATRWYRAPEIMLTFKEYTKAIDVWSVGCILAEMLSGKPLFPGKDYHHQLTLILDVLGTPTMEDYYGIKSRRAREYIRSLPFKKKVPFRTLFPKTSDLALDLLEKLLAFNPVKRITVEEALKHPYLEPYHDPDDEPTAPPIPEEFFDFDKHKDNLSKEQLKQFIYQEIMR

SEQ ID NO: 10859 - protein, 130 aa, Glycine max
  misc_feature (14)..(14): Xaa can be any naturally occurring amino acid
MAPAVMASSATTVXAPFQGLKSTAGLPVSRRSGSAGLSSVSNGGRIRCMQVWPIEGIKKFETLSYLPPLSTEALLKQVDYLIRSKWVPCLEFSKVGFVFREHNSSPGYYDGRYWTMWKLPMFGCTDATQV

SEQ ID NO: 10860 - protein, 480 aa, Listeria monocytogenes str. 4b F2365
MQIKNKAMLITYSDSLGKNMEELSKVMETYFEDAVGGIHLLPFFPSTGDRGFAPSDYTTVDSDLGSWEIIEKLGEKYYLMFDFMINHISRESLFFQDFKKEHLNSKYKDMFIRINDFFPPGRPNEKDLDLIYKRKDKAPFQEVEFADGGTELVWNTFGEEQIDLDVTAEVTKEFIRQTIKNMAAHGCSILRLDAFAYAIKKLDTNDFFVEPEIWDLLDEVKAEAAKYDMELLPEIHEHYSIQMKIANHDYYIYDFALPMVMLYSLYSGRVERLAKWLEMSPMKQFTTLDTHDGIGVVDARDLLTDEELDYTSAELYKIGANVKKIYSSEKYNNLDIYQINSTYYSALGDDDKSYLLARVIQCFAPGIPQIYYVGLLAGKNDIDLLEETKEGRNINRHYYTIDEIKNEVKRPVVKALCNLLRFRNTSEAFDLEGSIEIETPSSNEIVIIRKNKTNKITATLKANLSTKTFQISENERNILI

SEQ ID NO: 10861 - protein, 184 aa, Zea mays
  misc_feature (85)..(85): Xaa can be any naturally occurring amino acid
  misc_feature (90)..(90): Xaa can be any naturally occurring amino acid
  misc_feature (100)..(100): Xaa can be any naturally occurring amino acid
  misc_feature (129)..(129): Xaa can be any naturally occurring amino acid
  misc_feature (141)..(141): Xaa can be any naturally occurring amino acid
  misc_feature (148)..(148): Xaa can be any naturally occurring amino acid
  misc_feature (160)..(160): Xaa can be any naturally occurring amino acid
MASSMLSSATVVSSPAQAAMVAPFTGLKSSAAFPVTRKTDTDITSMASNGGRVNCMKVWPPVGKKKFETLSYLPDLTDVELSKEXVDYLXFRNKWIPCVXEFELEHGFVYREHGNPPGYYDGRYWNNVXNFPWFRCTDSAXQVLKEVXEGKKEYPKRFLXILGFQKKRQGPGFFFFPQKPPNFR

SEQ ID NO: 10862 - protein, 335 aa, Thermoplasma volcanium GSS1
MKAAILKKINEPVSIDDVDIPDPAENEVLIKQEYAGVCYRDLLAATGFFPRIALPMIQGHEIGGTVVKVGDKVEAFRPGDKVSSLIYIPCGKCEFCRSGNENLCPYKKSLGEEVQGGFRQYVNIPEISLVKAPNNVDGASLSLAACVTGMLYHALKRMGKAGEGKKVLITGAGGGVGIHAVEMAKAFGATVIAETTSPEKLDLLEKIGADYIVDGNSKFNEDVKKLGGADIVLECVGIYTFERSLRSLNNGGKMVIIGNVKPDPVSLPLGLIILKGNTIRGSISSTKKDVEEALNMVSKGMIKPIVGKEIDISQINEAYKLMKDKKSSGRIMIKF

SEQ ID NO: 10863 - protein, 308 aa, Mesorhizobium sp. BNC1
MKTYKLVNRDVSAPGRDSAADADGSGVEMPMIGLGVFQTPPDETTAAVEEALRLGYRHIDTAAAYGNEREVGEGIRRAGIARDEVFIETKIWISDYGYDETLHAFDKSAGKLGVDQIDLLLLHQPLPSAFDRTLGAYRALEKLLADGKVRAIGVSNFMPEHLTRLLTETSIVPAVNQIEVHPYFQQRALQRLHAEHGILTQAWSPIGGITFYRGGEKSTLEDPVLLEIAQQHGKSAAQVMLRWHLQEGRSVIPKSTKPARIAENFDVFDFELSGEQIAAIDALDTGVRSGPEPDSITLESYGRPIPEA

SEQ ID NO: 10864 - protein, 283 aa, Listeria innocua Clip11262
MKTVKLNNGIEVPILGFGTYQITDAGEAEQAVKEAIAAGYRHIDTAQSYMNEEAVGRGIAASGVDRKELFITTKIWVENVSYKGVMSSFDRSLKRLGLDYIDLLLIHQPYNDVYGAWMAMEELQAQGKIKAIGVSNFGVDRVVDLAAFNDITPQVNQIEINPFQQQSKNIEALRKEGVAVEAWAPFAEGKNDIFTNPILTKIAEKYGKSVAQVILRWLIEQDIIVLAKSVKPERMAQNLAVFDFELSEEDKSAIATLNQGESQFFSHADPEMVKWMASRKINI

SEQ ID NO: 10865 - protein, 259 aa, Triticum aestivum
  misc_feature (122)..(122): Xaa can be any naturally occurring amino acid
  misc_feature (198)..(198): Xaa can be any naturally occurring amino acid
  misc_feature (204)..(204): Xaa can be any naturally occurring amino acid
  misc_feature (215)..(215): Xaa can be any naturally occurring amino acid
MKTLLILTILAMAITISTANMQVDPSGQVQWPQQQLVPQPQQPLSQQPQQAFPQPQQTFPHQPQQQVPQPQQPQQPFLQPQQAFPQQPQQPFPQTQQPQQPFPQQPHQPFPQTQQPQQPFPXQPQQPFPQTQQPQQLFPQSQQPQQQFSQPQQQFPQPQQPQQSFPQQQPPFIQPSLQQQVNPCKNFLLQQCKPVSLXVSSLWXSMIWPQSDFQXWMRQQCCQQLAQFLKQSQCASIHTIIHSIIKAPFSSVVAGIGGQ

SEQ ID NO: 10866 - protein, 67 aa, Glycine max
MASSVISAPAGTTVNRAGAGMVAPFTGLKSMAGCPSRRTKNDVSSIASSGGRVQCMQVWPPVGREEV

SEQ ID NO: 10867 - protein, 279 aa, Enterococcus faecalis V583
MITSLADTVTLNNGTKIPGMGLGVFQIPDEETAKVVEEGIINGYRLIDTAQIYGNESGTGAGIKAGLAATGLNREDLFVTSKVWNAHISYDETIQAFNDSLERLGLDYLDLYLIHWPGNNSYKESWQALETLYAEGKVKAIGVSNFQVHHLEDLLSYAKVVPVINQVELHPKLDQKEVRDFCEKHDIKVQAWSPLMQGQLLSNETILAIAENHNKSAAQVILRWDIQQDILLAVKSVHKERMISNAAVFDFELSAEEMAQINQLNESLRVGPDPDTFDF

SEQ ID NO: 10868 - protein, 287 aa, Hordeum vulgare subsp. spontaneum
MSPTLSLKLKKSSHTPQSSVSSSTKLRLFKKEAACQSPSTLPVAMDMGLEVSSPSPFSSSVSSSPEHTAKRPAGRTKFRETRHPVYRGVRRRGNTERWVCEVRVPGKRGARLWLGTYATAEVAARANDAAMLALGGRSAACLNFADSAWLLAVPSALSDLADVRRAAVEAVADFQRREAADGSLAIAVPKEASSGAPSLSPSSGSDSAGSTGTSEPSANGVFEGPVVMDSEMFRLDLFPEMDLGSYYMSLAEALLMDPPPTATIIHAYEDNGDGGADVRLWSYSVDM

SEQ ID NO: 10869 - protein, 287 aa, Hordeum vulgare subsp. spontaneum
MSPTLSLKLKKSSHTPQSSVSSSTKLRLFKKEAACQSPSTLPVAMDMGLEVSSPSPFSSSVSSSPEHTAKRPAGRTKFRETRHPVYRGVRRRGNTERWVCEVRVPGKRGARLWLGTYATAEVAARANDAAMLALGGRSAACLNFADSAWLLAVPSALSDLADVRRAAVEAVADFQRREAADGSLSIAVPKEASSGAPSLSPSSGSDSAGSTGTSEPSANGVFEGPVVMDSEMFRLDLFPEMDLGSYYMSLAEALLMDPPPTATIIHAYEDNGDGGADVRLWSYSVDM

SEQ ID NO: 10870 - protein, 431 aa, Deinococcus radiodurans R1
MGERKCGGWPPKVFLHSLSPGGAGGSTKAVVWHGIGDIRLDDVPEPKIEAPTDAIVRLTASAICGTDLHFIRGTMSDMVPGTILGHEGVGIVEAVGPEVRNFVPGDRVVIPSSASCGYCPPCREGNTSQCDNANPNGPSAGTAFYGGPKSSGPLNGMQAEKVRVVYANSSLVKLPDNVSDDQAIMISDIFPTAYFGAEIAGVKTGSVVVVLGCGPVGQFSIISAKLLGATRVIAVDRLDDRLDMARKNGAEVINFEKEDPVEAVKKLTGGLLADCVIDAVGVDAQHAHAGPAKPDAEKEQKFEQEVQEVAPDAKPEKDGQWTPGDAPSQASEWAIEMTKKAGQIGIIGVYSPQMTTYPIGKAMNKNLTIRMGNCNHRAIIPGLVDLVAAGVVDPARVLTEHEHLGSAIEAFEAFDKRQPGWIKVELEPQAG

SEQ ID NO: 10871 - protein, 169 aa, Sinorhizobium meliloti 1021
MQRSLRHLLVHGRRQLMTFSLISPVFADGQPIPQKYTRFGENLFPPLKWTGTPEATQSFALIVEDPDAVSGLFRHCSIINIPGSWTELPQAVDTGPERGIKFIRNDFGNARYDGPQPPSGTGVHRYRFRLAALDAANLSIPDDVGAAEAWERACKHLIGEAEIVGTYEG

SEQ ID NO: 10872 - protein, 287 aa, Hordeum vulgare subsp. spontaneum
MSPTLSLKLKKSSHTPQSSVSSSTKLRLFKKEAACQSPSTLPVAMDMGLEVSSPSPFSSSVSSSPEHTAKRPAGRTKFRETRHPVYRGVRRRGNTERWVCEVRVPGKRGARLWLGTYATAEVAARANDAAMLALGGRSAACLNFADSAWLLAVPSALSDLADVRRAAVEAVADFQRREAADGSLAIAVPKEASSGAPSLSPSSGSDSAGSTGTSEPSANGVFEGTVVMDSEMFRLDLFPEMDLGSYYMSLAEALLMDPPPTATIIHAYEDNGDGGADVRLWSYSVDM

SEQ ID NO: 10873 - protein, 171 aa, Oryza sativa (japonica cultivar-group)
MAAAPSATSVHDFTVKGVQDASGKDVNLSTYKGKVLLIVNVASQCGLTNSNYTELSQLYEKYKVQGFEILAFPCNQFGGQEPGSNEEIVQFACTRFKAEYPIFDKVDVNGNNAAPLYKYLKSNKGGLFGDSIKWNFSKFLVDKEGRVVDRYAPTTSPLSIEKDIKKLLGSS

SEQ ID NO: 10874 - protein, 364 aa, Haloarcula marismortui ATCC 43049
MQGADADTVADALASDDALPGAGGFAGELDGTLVRDVLGRYPLFVERAVSDEARLDPGQWSHDPTALADPRSFPAGHIRNESGTQQRWSLPSLDPFGDRETAIETVGETVETSIDAVDTDSLAIAFSGGVDSALLAARLDAPLYVAGFPDSHDIEAARSAAELLGTEVRVVELTHDAIERAVPEIARATARTNAMDVQIALPLYLVAERVAGDGFDRLALGQGADELFGGYAKVAKAPEDPRVEADTVRGAQREVIASLPDQLERDVLALRAAGVEPVTPLLHDRVIGAALRLDGDLLVDGETRKVALRAAARESLPDEIADRDKKAAQYGSLAARELDRLARQAGYKRRMDDHVTQYVESLVE

SEQ ID NO: 10875 - protein, 243 aa, Methanococcoides burtonii DSM 6242
MYANIRPIKPLPGLIGVTGKNDFDLVIVRENTEGMYSSIEEIHDDVAYTKRVVSRKGSERIARSACKLAKERKNQVTIVHKSNVLKSDTLFLGVCREVAASEGVEYSDMLVDAMAYSLMSYPERYDVVVTTNLFGDILSDMSAALVGSLGLVPSANIGDKYAFFEPVHGSAPDIAGKGIADPIAAILSMKMMLEWMGYEREAVLVENAVSSSIKENMTTPDLGGSSNTSDVGKVIADHVRNNL

SEQ ID NO: 10876 - protein, 375 aa, Nicotiana tabacum
MEVISTNTNGSTIFKNGAIPMNGHQNGTSEHLNGYQNGTSKHQNGHQNGTFEHRNGHQNGTSEQQNGTISHDNGNELLGSSDSIKPGWFSEFSALWPGEAFSLKVEKLLFQGKSDYQDVMLFESATYGKVLTLDGAIQHTENGGFPYTEMIVHLPLGSIPNPKKVLIIGGGIGFTLFEMLRYPSIEKIDIVEIDDVVVDVSRKFFPYLAANFNDPRVTLVLGDGAAFVKAAQAGYYDAIIVDSSDPIGPAKDLFERPFFEAVAKALRPGGVVCTQAESIWLHMHIIKQIIANCRQVFKGSVNYAWTTAPTYPTGVIGYMLCSTEGPEVDFKNPVNPIDKETTQVKSKLGPLKFYNSDIHKAAFILPSFARSMIES

SEQ ID NO: 10877 - protein, 466 aa, Escherichia coli O6
MDKKQVTDLRSELLDSRFGAKSISTIAESKRFPLHEMRDDVAFQIINDELYLDGNARQNLATFCQTWDDDNVHKLMDLSINKNWIDKEEYPQSAAIDLRCVNMVADLWHAPAPKNGQAVGTNTIGSSEACMLGGMAMKWRWRKRMEAAGKPTNKPNLVCGPVQICWHKFARYWDVELREIPMRPGQLFMDPKRMIEACDENTIGVVPTFGVTYTGNYEFPQPLHDALDKFQADTGIDIDMHIDAASGGFLAPFVAPDIVWDFRLPRVKSISASGHKFGLAPLGCGWVIWRDEEALPQELVFNVDYLGGQIGTFAINFSRPAGQVIAQYYEFLRLGREGYTKVQNASYQVAAYLADEIAKLGPYEFICTGRPDEGIPAVCFKLKDGEDPGYTLYDLSERLRLRGWQVPAFTLGGEATDIVVMRIMCRRGFEMDFAELLLEDYKASLKYLSDHPKLQGIAQQNSFKHT

SEQ ID NO: 10878 - protein, 78 aa, Brassica napus
MGFWTLMEGLLLFANALAILNEDRFLAPRGWTLTELHQTGKRNSLKGQIVGLIHACHYMRLPLMLFNLIVIVFKLFSG

SEQ ID NO: 10879 - protein, 394 aa, Vibrio vulnificus CMCP6
MLSENTINIVKSTAPLLAETGPKLTAHFYQRMFEHNPELKDIFNMSNQRNGDQREALFNAICAYASNIDNLPALLGAVEKIAHKHSSFLITADQYQIVGGHLLATIDELFSPGQAVLDAWAEAYGVLANVFIQREEQIYQDNQSQTGGWRGLREFELVEKQYESAHICSFVFKPVDGGSVVSFKPGQYLGIYINDEQFENQEIRQYSLSSSVRPDCYRISVKREEGGRVSNYLHDHLDVGSKVKLAAPAGDFFLDAAPTAPVVLISAGVGLTPTLSMLESLTEHQAPVTWIHATENGQQHAFKQHVKQLVETHPHFNSLVWYNQPNSDDKIGDDFQFSGWVNLHEIETVLKQADVQVYFCGPVGFMQFIAKQLLEMGVPEQQFHYECFGPHKVV

SEQ ID NO: 10880 - protein, 400 aa, Bordetella bronchiseptica RB50
MSTSQKKPTVQQKKPAAQPAEKAAFKPKKSVALSGVVAGNTALCTVGRTGNDLHYRGYDILDFAGSAEFEEIAHLLVHGKLPNKAELKAYKEKLRALRGLPAQLQNVLECLPASSHPMDVMRTAVSVLGCVLPEKDDHNTPGARDIADRLMANLGSALLYWYHYSHNGRVIDVQTDDDSIGGHFLHLLHGAKPSDEWVRAMHTSLILYAEHEFNASTFTGRVIAGTGSDMYSSITGAIGALRGPKHGGANEVAFEVQKRYETPDEAEADIRQRVENKEVIIGFGHPVYTVSDPRNKVIKDVAKKLSRKAGSTKMFDIAERLETVMWDIKKMFPNLDWFSAVSYHMMGVPTAMFTPLFVIARTAGWSAHIIEQRIDNKIIRPTANYVGPEDQTYVPISKRA

SEQ ID NO: 10881 - protein, 317 aa, Escherichia coli O6
MTDKLTSLRQYTTVVADTGDIAAMKLYQPQDATTNPSLILNAAQIPEYRKLIDDAVAWAKQQSNDRAQQIVDATDKLAVNIGLEILKLVPGRISTEVDARLSYDTEASIAKAKRLIKLYNDAGISNDRILIKLASTWQGIRAAEQLEKEGINCNLTLLFSFAQARACAEAGVFLISPFVGRILDWYKANTDKKEYAPAEDPGVVSVSEIYQYYKEHGYETVVMGASFRNIGEILELAGCDRLTIAPALLKELAESEGAIERKLSYTGEVKARPARITESEFLWQHNQDPMAVDKLAEGIRKFAVDQEKLEKMIGDLL

SEQ ID NO: 10882 - protein, 154 aa, Glycine max
VSYGVEFEGAGASKESKVNGDGGRDVNLGDSNYSFGEAEALSDEMEEESRYVAEILRIRDVLLNPEDESEAVLFDSLRRLQMMELTEDCLKATEIGKAVNPLRKHGSKDIRQLSRTLIDGWKEMVDEWVKATTTTAITGSEEGTPDSANPSVVD

SEQ ID NO: 10883 - protein, 448 aa, Deinococcus radiodurans R1
MSLDLLLRGAVLVTPEGERRADLGIVGGQIAELTDEIATPAAQTLDVSGLHVFPGVLDDHVHLNEPGRTHWEGFETGTQALAAGGATSFLDMPLNSSPPVLTRERFEDKARLGEEKSLIDFGLWGGLTPLNLDQLDDLAECGVIGLKAFMSHSGLDEFPAADDLTLYEGMRTAKRHGLVVATHAESNEFTRRLTETARAQGKSGVRDYLESRPVVTELEAVQRALLFAQDTGAALHLVHVSSGAAVALAYEGKQKGIDVTIETCPHYLHFTGEDVERVGAALKCAPPLRDPAVQEELWRELLAGHIDTVGSDHSPAPPDMKTSEDFFSLWGGISGAQSTLNVMLEDGYAQRGLPLEIIAALLALNPAQRFGLPQKGRLAVGADADFALVALGEKFTLDTLYDRWQQNPYRGQSFQGRVHATYLRGQPVYQNGEFTGTPRGRLLRPRSL

SEQ ID NO: 10884 - protein, 433 aa, Leptospira interrogans serovar Lai str. 56601
MIWYPFTLQFEPDSPLKIERAKGEFLYDELGNSYIDGISSWWVSIHGHNHPKIVQAVKNQLEKLDHVLLAGFTHDPAEKLAAELLKITDGLFQKVLYSDNGSTAVEIMIKLAYQYFQNIGEVDRKIFIKWNSSYHGDTIGTMSVGGNSVFNRVFQGLMFPTKEFQTPNCNFCPMGKKPESCKVECIDPIEKFFQKSPKAVAGIVIEPLILGSGGMIFYKEEVLQRLETISKKYGSLLLLDEVFTGFGRTGSVFAYQRAKIRPDFIALAKGLSAGVSAVAVTLTTDRIHSAFVTADPEKGFYHGHTMTGNPIACSAALASLKIFFEENRLEQILRLESKLNVGLKKIAKEFPKAVKNCRVLGAVGVLELEVGKASGYHYPGNKILKKKFLEKGVLLRPLGNVIYLTPPYNIENSSLEKIFSAIRETLSEISFGN

SEQ ID NO: 10885 - protein, 191 aa, Ustilago maydis 521
MQTIKCVVVGDGAVGKTCLLISYTTNKFPSEYVPTVFDNYAVTVMIGEDPYTLGLFDTAGQEDYDRLRPLSYPQTDVFLVCFSVTSPASFENVKEKWFPEVHHHCPGVPCLIVGTQVDLRDDHAVIEKLARSKQRPVPFEAGERLARELGAVKYVECSALTQKGLKNVFDEAIVAALEPPVIRKKSKCAIL

SEQ ID NO: 10886 - protein, 426 aa, Enterococcus faecium
MKTLIKNGQINTRKNMTTPAEIWIEDGRIKAIGTGFSEAEFDEVFDAKGQLITPGLVDVHVHLREPGFTYKETIEAGTRSAARGGFTTVCAMPNLNPVPDTAEKLRQVYDIIRKDAVVKVLQYAPITENLRSEKLVDQEALIEEGAFAFTNDGVGVQTAGTMYLAMKEAAKNNKALVAHTEDESLLFGGVMHAGKKAEELGLPGILSVTESSQIARDLLLAEATGVHYHVCHVSTKESVRVIRDAKKAGIHVTAEVSPHHLILIDEDIPEDFGFWKMNPPLRGREDREALIEGLLDGTIDCIATDHAPHGLEEKSQSFMKSPFGIVGSETAFQLIYTHFVETGRFTLEQVINWLAVKPAEIFGLNAGTLTVGAPADVAVFDITQTCTIDKEDFLSKGENTPFIGWKVKGETQMTFVNGKLVWQKGE

SEQ ID NO: 10887 - protein, 240 aa, Triticum aestivum
GTRVLQDTLGVCGQIIPWNFPFMMLAWKVAPALACGNTVILKPAEQTPLSALYFGNLVKEAGLPAGVVNVLPGLGPSTGKAIAGHMDIDKVAFTGSTNTGRAIMKDAANNLKNITLECGGKSPSIVFADAELEQAVKWCHFGIMDNKGEVCTSTSRIYVHEDIYDKFLEKFVEVTKENDKLGAPFDESTVQGPQVSKTQYDRVLSYIEEGRKSGAKLLYGGSKHGDKGYFLQPTVFADTT

SEQ ID NO: 10888 - protein, 206 aa, Kluyveromyces lactis
MNSEYDYLFKLLLIGNSGVGKSCLLLRFSDDTYTNDYISTIGVDFKIKTVELDGKTVKLQIWDTAGQERFRTITSSYYRGSHGIIIVYDVTDRESFNGVKMWLQEIDRIATSTVLKLLVGNKCDLKDKRVVEYDVAKEFADANKMPFLETSALDSTNVEDAFLTMARQIKESMSQQNLNETTQKKEDKGNVNLKGQSLTNTGGGCC

SEQ ID NO: 10889 - protein, 463 aa, Crocosphaera watsonii WH 8501
MANLNPTASYSLALTIELPNIAGTLANVTQAIAGAQGSFGQISLIEHNLKITQREITVEASSEEHAEQIVSAVREIPNVKILKVSDRTFELHRKGKITIESRLPLHSQGDLAMAYTPGVGRICKAIATDPSEVYNLTIKNNTVAVVTDGSAVLGLGNLGPEAALPVMEGKAMLFKEFAKVDAFPICLATQDTEEIIETVKRIAPVFGGINLEDIAAPRCFEIEKRLRQELDIPVFHDDQHGTAIVTLAALFNALKLVHKTLEGVRIVINGAGAAGVAIASLLRAAGATTIWLCDSKGLISHNREDLNPQKKAYAVSASGTLADAMQGADVFLGVSAPGVVTPEMVRSMNKDPIVFAMANPIPEIQPELVTNDVAVMATGRSDYPNQINNVLAFPGVFRGALDCRAKNITERMYLEAAKAIASLVHSNQLNAEHIVPSVFDERVSHAVASAVELAARQDGVANQ

SEQ ID NO: 10890 - protein, 158 aa, Glycine max
  misc_feature (98)..(98): Xaa can be any naturally occurring amino acid
  misc_feature (100)..(100): Xaa can be any naturally occurring amino acid
  misc_feature (115)..(115): Xaa can be any naturally occurring amino acid
  misc_feature (130)..(130): Xaa can be any naturally occurring amino acid
MDSSLISFPAVTTVNRAGAGMVAPFTGLKYMAGFPTIKTNNDITSIASNGGRVQCMHVWPPLGKKKLETLYYLADLDDAQLLEEVEYLLRKGWIPCLXIXLEHGFLYREHNRLPXYYDGRYCTMCKLPMXCCTDASQVSEELQEATTAYSSCFMRIIA

SEQ ID NO: 10891 - protein, 362 aa, Sorghum bicolor
MGSTAEDVAAVADEEACMYAMQLASSSILPMTLKNALELGLLEVLQKDAGKALAAEEVVARLPVAPTNPAAADMVDRMLRLLASYDVVRCQMEDKDGKYERRYSAAPVGKWLTPNEDGVSMAALALMNQDKVLMESWYYLKDAVLDGGIPFNKAYGMTAFEYHGTDPRFNRVFNEGMKNHSVIITKKLLEFYTGFDESVSTLVDVGGGIGATLHAITSHHSHIRGINFDLPHVISEAPPFPGVQHVGGDMFKSVPAGDAILMKWILHDWSDAHCATLLKNCYDALPEKGGKVIVVECVLPVTTDAVPKAQGVFHVDMIMLAHNPGGRERYEREFRDLAKAAGFSGFKATYIYANAWAIEFIK

SEQ ID NO: 10892 - protein, 509 aa, Candida boidinii
MTTVRTDAIVIGAGIAGVKASIELTKAGVSNIILEARDRTGGRLNTVKTPNGRSFDLGASWFHDCLDNPLFEKTIAKGDIKFYFDDASLNLYNKDGYIHDDERLVPIFEEMQTYLETYWTPKSRENDVSIREAAYQYLLKKKNVLTDFQLKNAPQLLRSFELWIGSSWDILSARHICGDKHLGRNAFCLDGWSSVYNNELAELSQISGCGDDTKRLETSNKLYLNTEVKKITFSDWRKEITIKTKNTKTNKIDTYICKYIICTAPLSILKLQKNEVGSIEWSPKLPKQISSALDNLSFSALGKILFEFDEVFWPKDSDRFFCLPDYDAEMYNKVKRGDTNSGIEIRTSEKDIKSAPDAEGFTHPVLFLNVYRMNGAPALACLISNPLTKWIEADPQNRAWPVIKPLLAKIVSSLPNAPKEIPAPKSITCTNWTTDPYARGSYTGLTVHDEFEDGIQTLIDAKGIFDGKGRVRFAGEHCILQGSGCAHGAWRSGAREAAEIVKRINNSKL

SEQ ID NO: 10893 - protein, 293 aa, Hordeum vulgare subsp. spontaneum
MSPTLSLKLKKSSHTPQSSVSSSTKLRLFKKEAACQSPSTLPVAMGMGLEVSSSSPSSSSVSSSPEHAARRASPAKRPAGRTKFRETRHPVYRGVRRRGNTERWVCEVRVPGKRGARLWLGTYATAEVAARANDAAMLALGGRSAACLNFADSAWLLAVPSALSDLADVRRAAVEAVADFQRREAADGSLAIAVPKEASSGAPSLSPSSGSDSAGSTGTSEPSANGEFEGPVVMDSEMFRLDLFPEMDLGSYYMSLAEALLMDPPPTATIIHAYEDNGDGGADVRLWSYSVDM

SEQ ID NO: 10894 - protein, 476 aa, Pirellula sp. 1
MNQHSPSYAITIRLRYSDSPGAMGKITTAIGEADGAIGAVDIVNIRGGKISRDFTVNARDVDHGKRIVEHLRTVEEVEVVHTSDRVFLMHLGGKIEVLPKMPIKTRDDLSMAYTPGVARVCNAIAEDPDSSFALTIRQNTVAVVSDGSAVLGLGNIGPRAAMPVMEGKAMLFKEFAGVDAFPICLDTQDTEAIIETVRQLAPTFGGVNLEDISAPRCIEIEERLDKELEIPVFHDDQHGTAIVVLAGLKNSLLRVGKALPNIRIVVNGAGAAGTAIVKLLLISGAKDIVVCDRDGAIHAGEPSQPDASKQWIADNTNPRGASGKLSEVIQGADVFIGVSAPNVLQTEDVAAMAADPIVFALANPDPEILPANAAPHVRIMATGRSDFPNQINNVLCFPGLFRGVLDVRATTINNEMKLAAAEAIAATIPESDLLDDYVIPSVFDRRVAKVVAQAVAKAAVDTGVARRRNKPAEDIM

SEQ ID NO: 10895 - protein, 293 aa, Hordeum vulgare subsp. spontaneum
MSPTLSLKLKKSSHTPQSSVSSSTKLRLFKKEAACQSPSTLPVAMDMGLEVSSSSPSSSSVSSSPEHAARRASPAKRPAGRTKFRETRHPVYRGVRRRGNTERWVCEVRVPGKRGARLWLGTYATAEVAARANDAAMLALGGRSAACLNFADSAWLLAVPSALSDLADVRRAAVEAVADFQRREAADGSLAIAVAKEASSGAPSLSPSSGSDSAGSTGTSEPSANGVFEGPVVMDSEMFRLDLFPEMDLGSYYMSLAEALLMDPPPTATIIHAYEDNGDGGADVRLWSYSVDM

SEQ ID NO: 10896 - protein, 129 aa, Buchnera aphidicola str. Sg (Schizaphis graminum)
MSLGMITMSITKEQILEAVSEMSVMNVVELISAMEKKFGVSANMSVNTNNNSEKSTIEEKTEFDIFLKSIGPNKVSVIKSVRSATGLGLKEAKDLVESAPTVLKENMSKNDAESLKKTLEDAGAEIEIK

SEQ ID NO: 10897 - protein, 411 aa, Rickettsia montanensis
DSEFAELKIRGKIFELPILKASIGEDVIDISRVSAEADCFTYDPGFMSTASCQSTITYIDGDKGILRHRGYDIKDLAEKSDFLEVAYLLIYGELPSGEQYNNFTKQVAHHSLVNERLHYLFQTFCSSSHPMAIMLAAVGSLSAFYPDLLNFKEADYELTAIRMIAKIPTIAAMSYKYSIGQPFIYPDNSLDFTENFLHMMFATPCTKYKVNPIIKNALNKIFILHADHEQNASTSTVRIASSSGANPFACISTGIASLWGPAHGGANEAVINMLKEIGSSEYIPKYIAKAKDKNDPFRLMGFGHRVYKNYDPRAAVLKETCKEVLKELGQLDNNPLLQIAIELEAIALKDEYFIERKLYPNVDFYSGIIYKAMGIPSQMFTVLFAIARTVGWMAQWKEMHEDPEQKISRPR

SEQ ID NO: 10898 - protein, 355 aa, Botryotinia fuckeliana
MTARAPNPASGSRKISFNVSEQYDIQDVVGEGAYGVVCSALHKPSGQKVAIKKITPFDHSMFCLRTLREMKLLRYFNHENIISILDIQKPRNYESFTEVYLIQELMETDMHRVIRTQDLSDDHCQYFIYQTLRALKAMHSANVLHRDLKPSNLLLNANCDLKVCDFGLARSAASQEDNSGFMTEYVATRWYRAPEIMLTFKEYTKAIDVWSVGCILAEMLSGKPLFPGKDYHHQLTLILDVLGTPTMEDYYGIKSRRAREYIRSLPFKKKVPFKTMFPKTSDLALDLLEKLLAFNPVKRITVEEALKHPYLEPYHDPEDEPTANPIPEEFFDFDKNKDNLTKEQLKKLIYDEIMR

SEQ ID NO: 10899 - protein, 89 aa, Glycine max
SRQADNDCIEDEGFRGNGLPRWASHALELVELILRPPEGGPPCLPDHSEQVISALNLLRFILIIDSRGQRSAKLFRKETLHKVHSEWLT

SEQ ID NO: 10900 - protein, 98 aa, Glycine max
  misc_feature (21)..(21): Xaa can be any naturally occurring amino acid
  misc_feature (41)..(41): Xaa can be any naturally occurring amino acid
  misc_feature (76)..(76): Xaa can be any naturally occurring amino acid
  misc_feature (84)..(84): Xaa can be any naturally occurring amino acid
QLPNHTVHTGSDCGAIAHLHXEHGQNFLDMLDGISLFVLLXDTRDPSSIVALDAIYGTFLYIDWGIDGSYWISSEXKGLNDRLXHIAPFTPCHSYSSI

SEQ ID NO: 10901 - protein, 192 aa, Triticum aestivum
  misc_feature (36)..(36): Xaa can be any naturally occurring amino acid
  misc_feature (70)..(70): Xaa can be any naturally occurring amino acid
  misc_feature (148)..(148): Xaa can be any naturally occurring amino acid
RRPTPSVPGSRSNNTLPWSPAVMASSATTGAPFQGXKSTAGLPVGRRSSGSLGSASHGGWIMCMQVWPIXGIKKFETLSYLPPLSTEALLKQVDYLIRSKWVPCLKFNKVAFLFREHNSFPGYYDGRYWTMWKLPMFWCTDTTQVLNXEVEDVKKEYPDSYIRVIRLDNLRQLQCVIFIAFRPSGCEEYDKA

SEQ ID NO: 10902 - protein, 380 aa, Mycobacterium bovis AF2122/97
MSKKHTTLNASIIDTRRPTVAGADRHPGWHALRKIAARITTPLLPDDYLHLANPLWSARELRGRILGVRRETEDSATLFIKPGWGFSFDYQPGQYIGIGLLVDGCWRWRSYSLTSSPAASGSARMVTVTVKAMPEGFLSTHLVAGVKPGTIVRLAAPQGNFVLPDPAPPLILFLTAGSGITPVMSMLRTLVRRNQITDVVHLHSAPTAADVMFGAELAALAADHPGYRLSVRETRAQGRLDLTRIGQQVPDWRERQTWACGPEGVLNQADKVWSSAGASDRLHLERFAVSKTAPAGAGGTVTFARSGKSVAADAATSLMDAGEGAGVQLPFGCRMGICQSCVVDLVEGHVRDLRTGQRHEPGTRVQTCVSAASGDCVLDI

SEQ ID NO: 10903 - protein, 260 aa, Listeria monocytogenes str. 4b H7858
MPRLGFGVWKVQDGDEAVNSVKWAIEAGYISIDTAAAYKNEEGVGQAIKESGVKREDLFVTTKLWNAEQGYESTLAAFDESLRKLELDYVDLYLIHWPVKGKFKDTWRAFEKLYKDKRVRAIGVCNFHEHHLKELMEDAEIAPMVNQIELHPQLTQEPLRKFCAENNIVVEAWSPLGNGKLLSNPEIKAIADAHGKSVAQVILRWDLQIGVVTIPKSVHQERIIQNADIFDFELSEEEVAKISGLNKDERTGPDPDNFNF

SEQ ID NO: 10904 - protein, 414 aa, Triticum aestivum
  misc_feature (40)..(40): Xaa can be any naturally occurring amino acid
  misc_feature (133)..(133): Xaa can be any naturally occurring amino acid
  misc_feature (182)..(182): Xaa can be any naturally occurring amino acid
  misc_feature (236)..(236): Xaa can be any naturally occurring amino acid
  misc_feature (271)..(271): Xaa can be any naturally occurring amino acid
NPTPTTAKKIHRSIDLGARRTATRSDHIQRRKIKPPPPPXMKLQTEAAAAGGEGRLMIRQVWANNVESEFQAIRQVAERFPYVSMDTEFPGVIHCPSKHHATLTPSERYAALKANVDALHLIQVGLAFAASPXAAPAVAFEINLREFDPRVPDPVGAVRGAQGERGRAPPDPGGPGVRARAXPPPAGPLGLVRPGSDRRAPTWVTFHSAYDFGYLVKLLMGRKLPRTLPEFLGLVXRVFFGDQVYDARPAWVTCPSPYGCLGRPGRRSWAXLPPPRSPSLRLVRARSPGTSSAGIRDVYCAGGTSGGLDALAAQLGVKRPAGMSHQAGSDAALTWDVFRRIREVYFAGNSRQGQGQGVGNFAGVLYGLDLELHLAAPADNGNGNGNRNNNKNKCGSGNGAGGRGNNRRAVAALR

SEQ ID NO: 10905 - protein, 244 aa, Brucella melitensis 16M
MRIRGGRNGNSGMDEARKLKIAAAAEALTYVKDGMRLGIGTGSTAEEFVRLLAEKVKGGFRVIGVPTSERTAKLCEELGVALTTLEETPHLDLTIDGADEVDGELSLIKGGGGALLREKIVAAASDSMIVIADQSKVVETLGRFPLPIEVNRFGLGATIRAIEAAAVKCGLAGPLNLRLKDGSPFLTDGGHYIVDASFGRIPDPKTLSDALFAIPGVVEHGLFIELARAAIIAGTDGIRTMNRS

SEQ ID NO: 10906 - protein, 370 aa, Brucella suis 1330
MASRKLLLLPGDGIGPEAMAEVRKVIAFLNSDLNLGFETEEGLVGGCAYDAHGQAISDADMEKALAADAVLFGAVGGPKWDSVPYEVRPEAGLLRLRKDMQLYANLRPAICYPALAHSSSLKPEVIEGLDILILRELTGGVYFGEPKEIIDLGNGQKRGIDTQVYDTYEIERIADVAFELARTRRNKVTSMEKRNVMKSGVLWNQVVTARHKEKHADVQLEHMLADAGGMQLVRWPKQFDVILTDNLFGDLLSDVAAMLTGSLGMLPSASLGAADSKTGKRKALYEPVHGSAPDIAGKGIANPIAMIASLAMCLRYSFGLVAEADRLEAAIAGVLDDGIRTADIWSEGNTKVGTTEMGDAILAKFKALSA

SEQ ID NO: 10907 - protein, 447 aa, Triticum aestivum
  misc_feature (12)..(12): Xaa can be any naturally occurring amino acid
  misc_feature (132)..(132): Xaa can be any naturally occurring amino acid
  misc_feature (434)..(434): Xaa can be any naturally occurring amino acid
MENSGKIVMGRXELGGEIGKGAFGKVHYAKNLESNRGVAIKILDKEKVLKVGLAEQVRREITTMRLVAHKSIVQLHEVMATRSKIYFVMEYMKGGELFDKVSKASKLTEGAAHKNFQQHTSGVALGYRRRVXHRVLKALNLLLLGMAWRKGSAFGLSALSESKSHEGMLHTTCGSPAYVAPEVISKGGYDGAKSDIWSCGVILFVLVAGYLPFQGQNLIEMYRKIEKGDFRCPGWVSQKLQKLLYKIMDPDPNKRISIQKIKESTWFRKGPGENLTVKERLPSENATTDAVPTLGVRRRKNSHEDAKPLAVTNLNAFEIISFSTGFDLSGLFVEKESKKEARFTSEQPASAIVSKLEAVAKTLNLRVRKKDNGVVKMQVRKEGRNGVLQFDSEIFEISPSYHLIEMKQTSGDSLEYQKLLEEGIRPALKDICLXAWHGADGQQEHQG

SEQ ID NO: 10908 - protein, 255 aa, Candida boidinii
MSEINETIGENPQPVEHHEPAPLQHEEQQQQQNHDQDQDQRQQQQNLAQQQQELEEKQKELQIQLEQQQQAGISEDDQELAILKAKMEEMKQEANALREMQEQMGNNGTHPHLDLAARQDIDNRSVYIGNLDYAATPDELQKHFESCGSINRITIPTNKFTGNPKGFAYIEFSDASYVPQALSLNDSLFKGRNLKISAKRTNVPGFSRGRGGPMRGGFRGGRGGFRGRGGFRGGRGGGFRGRGGFRGGRGGFQPY

SEQ ID NO: 10909 - protein, 272 aa, Oryza sativa (indica cultivar-group)
MGRRACCAKEGMKRGAWTSKEDDVLASYIKSHGEGKWREVPQRAGLRRCGKSCRLRWLNYLRPNIKRGNIDDDEEELIVRLHTLLGNRWSLIAGRLPGRTDNEIKNYWNSTLSRKIGTAATAAAGSRGGSTPDTARATDAASSSSVVPPGQQQQPASRADTDTATAAAAAAATTTTVWAPKAVRCTRGFFFHDRETAPLAAAAPAPAGELGDGDDVDCDYYCSGSSSAATTTSSSSLPAVVEPCFSAGDDWMDDVRALASFLDTDDAWNLCA

SEQ ID NO: 10910 - protein, 441 aa, Ralstonia metallidurans CH34
MTHVFHRNPKQTLPVAVGGQGIELIDSNGRRYLDASGGAAVSCLGHGHPRVIEAIKAQVDTIAYAHTSFFTTEVSETLAQTLADAAPGDLDHVYFVSGGSEAVEAALKLARQYFVEIGQTQRRHFIARRQSYHGNTLGALAIGGNAWRREPFLPLLVPAHHVSPCYAYRDQAAGEADTQYAQRLADELEAKILELGPDSVAGFVAETVVGATAGAVPPVADYLKRIRAVCDKYGVLLILDEVMSGMGRTGYLFACEEDGVVPDIVTIAKGLGAGYQPIGAMLSTSRIYDAIIGGSGFFQHGHTYIGHATACAAALAVQRTIVEDKLLDNVLARGEQLRARLRESLGDHPNLGDVRGRGLFVGVEFVADRATKATLDPAKKTHAVLKRTCMEHGVLVYPMGGTVDGIHGDHVLFAPPFICTPTDIDNIVDRFTQAVKTVLPA

SEQ ID NO: 10911 - protein, 252 aa, Zea mays
MYRAKRAALSPKVKRRVGKYELGRTIGEGTFAKVRFAKNTENGEPVAIKILDKEKVKRHRLVEQIKREICIMKLVRHPNVVRLFEVMGSKARIFIVLEYVTGGELFEIIATNGRLKEDEARKYFQQLINAVDYCHSRGVYHRDLKLENLLLDAAGNLKVSDFGLSALTEQVKADGLLHTTCGTPNYVAPEVIEDGGYDGATADIWSCGVILFGLCWNLLLALKCENLLNLVGAKLGSFLSCSHLIDSTIKLF

SEQ ID NO: 10912 - protein, 188 aa, Rickettsia sp. APGEA35
IMLAAVGSLSAFYPDLLNFKEADYELTAIRMIAKIPTIAAMSYKYSIGQPFIYPDNSLDFTENFLHMMFATPCTKYKVNPIIKNALNKIFILHADHEQNASTSTVRIAGSSGANPFACISTGIASLWGPAHGGANEAVINMLKEIGSSEYIPKYIAKAKDKNDPFRLMGFGHRVYKNYDPRAAVLKET

SEQ ID NO: 10913 - protein, 615 aa, Zea mays
MRPRGGPARTRPLPRTAASFSFARRHPIRSSPPLRRSLSPRVVTRPRPPPSLSSFPLLKPPVRQPQWIFAPHLHPLAMAPPPASPADSAPDPRPTASAPVPITVPSPRDHAHHHHLVDRRDTPRGRAWEPERNRRGEAMDGAAAVKLVPGEAGYVLEDVPHVSDYLPDLPTYSNPLQDNPAYSVVKQYFVNPDDTVCQKIVVHKDGPRGNHFRRAGPRQKVYFEPDEVHACIVTCGGLCPGLNTVIREIVCGLSDMYGVTKILGIQGGYRGFYARNTITLTPKSVNDIHKRGGTILGSSRGGHDTVKIVDSIQDRDINQVYVIGGDGTQRGAGVIFEEVRRRGLKVSVAGIPKTIDNDIPVIDKSFGFDTAVEEAQRAINAAHVEAVSAENGIGLVKLMGRHSGFIAHYATLASRDVDCCLIPESPFYLEGEGGLFRYIEKRLKDNGHMVIVVAEGAGQKLIAETMQSIGKDASGNELLLDVGLWLSQKINEHFKKNKMTINLKYIDPTYMIRAIPSNASDNVYCTLLAHSVVHGAMAGYTGFTIGQVNGRHCYIPFYRITEKQNRVSITDRMWARLLSSTNQPSFLCNKVVEEAKKEHERATRLLDGSPSHRKG

SEQ ID NO: 10914 - protein, 396 aa, Triticum aestivum
MALSISAPTSSPFLPAPRQVGRWSSSPSSAKPAVFSLRRPVVVARAAAGNAPSSPAGAVVTELDVVSSFSEIVPDTVVFDDFEKFAPTAATVSSSLLLGIAGLPDTKFKSAIDTALVDGECNTMEKPGDRMSCYLTKALGNVGAELAHQVPGRVSTEIDARLAYDTQGIVQRVHELLQIYNEHDIPSERLLFKIPATWQGIEASRLLESEGTQTHLTFVYSFAQAAAAAQAGASVVQIFVGRIRDWAKNHSGDPEIDEALKKGEDAGLALVKKAYVYIHKNGYKTKLMAAAVRNKQDVFSLLGIDYIIAPLKILQSLDESVTDSDEKYGYVQRLTLSLDKMYNFSQEELVKWDQLSLAAAMGPAAEELLASGLEGYANQARRVEELFAKIWPPPNV

SEQ ID NO: 10915 - protein, 78 aa, Brassica napus
MGFWTLMEGLLLFANALAILNEDRFLAPKGWTLAELHQTGKRNSLKGQIVGLIHACQYMRLPLMLFNLIVIVVKLFSG

SEQ ID NO: 10916 - protein, 152 aa, Glycine max
YSDYQGGKILTGGSVLESGGNFVQPTIVEISPDAPVVKEELFGPVLYVMKFQTLEEAIALNNSVPQGLSSSIFTQRPGTIFKWIGPRGSDCGIVNANIPTNGAEIGGAFGGEKATGGGREAGSDSWKQYMRRSTCTINYGSELPLAQGINFG

SEQ ID NO: 10917 - protein, 533 aa, Glycine max
MGNCCRSPAAVAREDVKSSFSNADHGKRGGGGSASAAAKQKAPITVLAGVPKENIEDRYLVDRELGRGEFGVTYLCIDRDTRELLACKSISKRKLRTAVDVEDVRREVAIMRHLPESPSIVSLREACEDDNAVHLVMELCEGGELFDRIVARGHYTERAAAAVTRTIVEVVQLCHKHGVIHRDLKPENFLFANKKENSPLKAIDFGLSIFFKPGERFSEIVGSPYYMAPEVLKRNYGPEIDIWSAGVILYILLCGVPPFWAESEQGVAQAILRGLIDFKREPWPSISESAKSLVRQMLEPDPKLRLTAKQVLEHPWLQNAKKAPNVPLGDVVKSRLKQFSMMNRFKRKALRVIADFLSNEEVEDIKDMFKKMDNDNDGIVSIEELKAGFRNFGSLLADSEVQLLIEAVDSNGKGTLDYGEFVAVSLHLRRMANDDHLHKAFSYFDKDGNGYIEPDELRNALMEDGADDCTDVANDIFLEVDTDKDGRISYDEFVAMMKTGTDWRKASRHYSRGRFNSLSLKLMKDGSLNLGNE

SEQ ID NO: 10918 - protein, 198 aa, Triticum aestivum
LAGRVDAPRLDRPLLPSPRAPPSPSSSSIPMQQRRGRPSGTDGSDFSYRMVVDSRYQRVADGRSRLARLMLVQTLHQVAGGALLLLSLSKGTEINKFAVLSLAAGLLAILLGEFGRRRTVAVFLPLYTSLSSIAIAFSVTCIIRSDLFVKITKQNTADITSYEMFDVVRVALGILLQLVVITTSTRLLLILSALNGTP

SEQ ID NO: 10919 - protein, 342 aa, Burkholderia sp. NK8
MSSYNIALNFEDGVTRFVECKAGEKVLDAAFRAKINLPMDCSDGVCGTCKCRAESGSYDLGEDYIEDALSDDEKEGGLVLTCQMVPQSDCVIAVPASSTACKTAQSKFAAKVTKVAPHNDAAVVLELDVDAAASAPVFLPGQYVNIDVPGSGQHRSYSFSSAPGETKISFLIKKIPGGVMSTWLESAETGSTVELTGPLGSFYLRAVERPLLFLAGGTGLAPFLSMLEVLARANSQQKIHLIYGVTRDLDLVQVEAIEAYTAKLSNFTFSTVVADADSDHPRKGWVTQHMPAESLNDGDVDVYLCGPPPMVDAVRKHFDDNGVKPNSFHYEKFTPNAAPVTA

SEQ ID NO: 10920 - protein, 453 aa, Dechloromonas aromatica RCB
MSLSSNQDWLARSQAAVWHPCTQMQHHAQTASAAHLPLVPIARGSGAWLYDFDGKRYLDGISSWWTNLFGHANPRINAALKDQLENLEHVMLAGFTHQPVVELSERLSALTGGSLGHAFYASDGASATEIALKMSFHYWRNTGRPEKAEFLCLAGSYHGETVGALAVTDVAIFKDAYAPLVRAATVIPSPDSRLAEAGESPADVARRAAAALEAHLEKHGENIAALIVEPLVQGAAGMVMYDPEYLRLARQLCDRYEVHLICDEIAVGCGRTGTFFAHEQAANDGNPIRPDLMCLSKGISGGYLPLSIVLCSDTIYEAFLDDSVARAFLHSHSYTGNPLACRAALATLNIFESDDILAANRLKSAKISTALAPLADHPQVRHLRQRGMITAFDVETDDPYFSRRFYRATLGREALIRPIGNTVYLMPPYIISDDEIAHLGQSIAGSLQEALAK

SEQ ID NO: 10921 - protein, 489 aa, Magnetospirillum magnetotacticum MS-1
MILKDSSLLKSRAFVNGAWTDADNGATFDVLNPATGEILASVPDMGAAEARRAIEAANAAWPAWKAKTGKERGAILRNWFNLIMAHQEDLAVLLTAEQGKPLAEARGEIAYGASFIEWFAEEAKRVYGDTIPGHAPDKRIVVVKEPIGVVAAITPWNFPNAMITRKCAPALAVGCPVVVKPAEDTPLSALALAELAVRAGIPAGIFNIVTARHGALVGGELSGNPLVRKLSFTGSTQVGKLLMSQCAATVKKVSLELGGNAPFIVFDDADLDAAVAGAMASKYRNAGQTCVCANRMLVQDGVYDEFARRLAKAVSQLKVGDGLASDANQGPLINAKAVEKVERMLADAVSKGATIVCGGKRHALGRTFFEPTIVTNVTSTMSMAREEIFGPVAPLFRFKTEAEAIAMANDTEFGLAAYFYAGNIARVWRVAEKLEYGMVGINDGIISTEVAPFGGVKESGIGREGSKYGIEDFLEIKYLCLGGIKEAAQ

SEQ ID NO: 10922 - protein, 295 aa, Zea mays
  misc_feature (20)..(20): Xaa can be any naturally occurring amino acid
  misc_feature (52)..(52): Xaa can be any naturally occurring amino acid
  misc_feature (90)..(90): Xaa can be any naturally occurring amino acid
  misc_feature (219)..(220): Xaa can be any naturally occurring amino acid
PLWRRTRRSWTREEDKAFEXNAVAAAAAPPADGPPDDGWFTALVASVPARTXEEVRLHYEALVEDVAAIEAGRIPLPRYAGEESSAATPXGSGAAGPSTPKDGGGGSGHRREERKGGVGADAGKSCSKAEQERRKGVPWTEEEHRLFLLGLDKFGKGDWRSISRNFVISRTPTQVASHAQKYFIRLNSMNRDRRRSSIHDITSVTAGEVAAAGAPITGXXARPRRGQMPMGPGGMKHHHPVPPMGMYGHAPMGHPVAGHMVAPAAVGTPVMFPPGHHSPYVLPVGYPAPPTKMHQ

SEQ ID NO: 10923 - protein, 258 aa, Candida albicans SC5314
MSSYTELPQSAPPYSEGESGSPPRQFGDNIPDDFKYSVSVASCELPLRQLFIRKVYSLLTIQLMGSVIMGFIIRSSDSFKIWAMTNTWLLILSFIGSIGFMIGAFFKARSYPINLILLGGFTICESYTLGVACAFIESSILIEAILLTLIIFIGLTIFAFQTKYDFISWQGTVGMMLWGLIGWGFVMMFIPHQQNSMMENVYSFLGALIFSIYIIIDTQQIMKTLHLDDEIIGCISLYLDIINLFLFILRILNNNRDD

SEQ ID NO: 10924 - protein, 376 aa, Zea mays
  misc_feature (91)..(91): Xaa can be any naturally occurring amino acid
  misc_feature (112)..(112): Xaa can be any naturally occurring amino acid
  misc_feature (128)..(128): Xaa can be any naturally occurring amino acid
  misc_feature (153)..(153): Xaa can be any naturally occurring amino acid
  misc_feature (170)..(170): Xaa can be any naturally occurring amino acid
  misc_feature (190)..(190): Xaa can be any naturally occurring amino acid
  misc_feature (207)..(207): Xaa can be any naturally occurring amino acid
  misc_feature (235)..(235): Xaa can be any naturally occurring amino acid
  misc_feature (251)..(251): Xaa can be any naturally occurring amino acid
  misc_feature (270)..(270): Xaa can be any naturally occurring amino acid
  misc_feature (286)..(286): Xaa can be any naturally occurring amino acid
  misc_feature (350)..(350): Xaa can be any naturally occurring amino acid
MGSTAGDVAAVVDEEACMYAMQLASSSILPMTLKNAIELGLLEVLQKEAGGGKAALAPEEVVARMPAAPSDPAAAAAMVDRMLRLLASYDXVVRCQMEDRDGRYERRYSAAXVCKWLTPNEDGVSMGXALALMNQDKVLMESWYYLKDAVLDXGGIPFNKAYGMTAFEYXHGRTRRFNRVFNEGMKNHSXVIITKKLLDFYTGFEGXVSTLVDVGRPAWGATLHAITSRHPHISXGVNFDLPHVISEAPPXFPGVRHVGGDMFASVPAGXDAILMKWILHDWSDAXHCATLLKNCYDALPENGKVIVVECVLPVNTEATPKAQGVFHVDMIMLAHNPGGKERYEREFREXLPRGAGFSGFKATYIYANAWAIEFIK

SEQ ID NO: 10925 - protein, 367 aa, Saccharomyces cerevisiae
MHINVRGTRKIISNVSSFTPRYEFPKYSMPLTDFKGHQVKALKTFEKLLPQMNMIIELRDIRAPLSTRNVVFDRIARKEHDVMKLVVYTRKDLMPGNKPYIGKLKNWHEELGEKFILLDCRNKTDVRNLLKILEWQNYELETNGGYLPMGYRALITGMPNVGKSTLINSLRTIFHNQVNMGRKFKKVAKTGAEAGVTRATSEVIRVTSRNTESRNEIYLIDTPGIGVPGRVSDHNRMLGLALCGSVKNNLVDPIFQADYLLYLMNLQNLNDGRTELYPGSTNSPTNDIYDVLRRLQVNKSQNEKSTAIEWTNKWRLHGKGIIFDPEVLLNNDEFSYKNYVNDQLEKLGDLSYEGLSNKLKGNPNQVF

SEQ ID NO: 10926 - protein, 364 aa, Glycine max
MGKGGMSIDEHGEGKEENMAAWLVGMNTLKIQPFKLPTLGPHDVRVRMKAVGICGSDVHYLKTLRCAHFIVKEPMVIGHECAGIIEEVGSQVKSLVPGDRVAIEPGISCWHCNHCKHGRYNLCDDMKFFATPPVHGSLANQIVHPADLCFKLPDNVSLEEGAMCEPLSVGVHACRRANIGPETNVLIMGAGPIGLVTMLAARAFGAPKTVIVDVDDHRLSVAKSLGADDIIKVSTNIKDVAEEVVQIQKVMGAGIDVTFDCAGFDKTMSTALSATQPGGKVCLVGMGHSEMTVPLTPAAAREVDVVGVFRYMNTWPLCLEFLRSGKIDVKPLITHRFGFSQKEVEEAFETSARGGNAIKVMFNL

SEQ ID NO: 10927 - protein, 349 aa, Methanosarcina mazei Go1
MENGMHHNVFTNTPTIPIDVKDRSVSELMDGMLRTGFQGRKLAESVQAWSNMLKEKDTTVLMGLSGAMVPAGMRRVISYLIRERMIDCLVSTGANLFHDSHEALGRKHYVGSHLANDEKLFEHGVDRIYDVFAVEEEFRNADNLIADFAEEIGEISCSSREFMYLLGKELVRRGAAEDSIVVSAYRHNVPIFVPALSDSSIGIGLTIARRRGLKLEIDQIKDVDEITQIVEKSGHTGVVYVGGGVPKNFIQQTEVIASILGMDVPGHEYAIQYTSDSPHWGGLSGCTFDEAVSWGKVAAQAKKVQVFVDATIALPIVAHALHEKTRGVKRTAPVFSWDGPEGLEIAYNE

SEQ ID NO: 10928 - protein, 543 aa, Glycine max
  misc_feature (123)..(123): Xaa can be any naturally occurring amino acid
MVSPISHLVTLILLLSVSLAASASLEENFVQCLSFYSDKAAPFYASIYTPQNASFNKILESSAQNLRYLVPSAPKPELIFTPLTDSHVQVAVTCSKKLGIHLRIRSGGHDYEGLSYVSEVESXFIIVDLSKLRAVDVDIEDNTAWIQAGATIGEVYYKIYEKSSVHGFPAGLCTSLGVGGHITGGAYRPMMRKYGLGADNVVDARIVDANGQILDREAMGEDLFWAIRGGGGASFGILLWWKIKLVPVPETVTVFTVTRSLEQDATKILHRWQEVAPYIDEDLFIRVIIQPATVGNKTERTITTSYNAQFLGGADRLLQVMKESFPELGLTKKDCLETSWIKSVLYIAGYPNDTPPEVLLQGKSTFKNYFKAKSDFVRDPIPETGLEGLWQRLLEEDSPLMIWNPYGGMMSKVSESDIPFPHRNGTLYKIQYLTLWQDGDKNASKHEDWIRKLYNYMTPYVSKFPREAYVNYRDLDLGMNKKNSTSYIQATAWGNMYFKDNFNRLVKIKTKVDPDNVFRHEQSIPPLPVSSMRLKDKKCKTWE

SEQ ID NO: 10929 - protein, 509 aa, Gibberella zeae PH-1
MTFPSDIHTFHSGRPQPESSSKSNTFVSVDPSNAKPLATIYTTTSEQLNQTVAAAQAAFPAWSQTPAPRRAAILLKAASILRERNDELALTETLDTGKPWSETSTVDVVTGADVLEYYAHMAAGSFPGQNTRLRPDAFVLTTHEPLGVCAGIGAWNYPIQIALWKSAPCLAAGNCMVYKPSEVTPLHAETLAQIYIEAGVPPGVFNVVYGDGIAVGAPLVAHSGIAKVSFTGQVSTGSKVASQAVTDMKGVTMELGGKSPLVILPDADVEDAADTAMVANFFSTGQVCTNGTRVFVPDTLLSQVEEAIVQRCREGIRMGLPRKTETNFGPMVSAAQQEKVKMYIQHGRTVDKAKVLFNGSQEASMPQPTSDGFWVHPVVFTNCTDDMRVTREEIFGPVMCIMPYKTQGRPRQEWLSDLIARANDTPMGLAAGVVSSDVGLAQEVVQKLDAGITWINTWGESPAEMPVGGWKMSGIGLENGHEGISAYMRTKSTLIQLGRGACKGVFSKL

SEQ ID NO: 10930 - protein, 303 aa, Gibberella zeae PH-1
MADQHEVDLDSIIDRLLEVRGSRPGKQVQLLEAEIRYLCTKAREIFISQPILLELEAPIKICGDIHGQYYDLLRLFEYGGFPPEANYLFLGDYVDRGKQSLETICLLLAYKIKYPENFFILRGNHECASINRIYGFYDECKRRYNIKLWKTFTDCFNCLPIAAIIDEKIFTMHGGLSPDLNSMEQIRRVMRPTDIPDCGLLCDLLWSDPDKDITGWSENDRGVSFTFGPDVVSRFLQKHDMDLICRAHQVVEDGYEFFSKRQLVTLFSAPNYCGEFDNAGAMMSVDESLLMAAKTRQSIPSPR

SEQ ID NO: 10931 - protein, 462 aa, Listeria monocytogenes EGD-e
MFKTNVEQNNVPVFGSFESGQDLPEKRMNKESVDPRIAYQLVKDQLIDEGSARQNLATFCQTYMEPEAEQIMAETMEKNAIDKSEYPQTAKLESSCVNMLADLWNVDESEHYMGTSTVGSSEACMLGGMAMKFRWRSAALKNGLDIHAKKPSLVISSGYQVCWEKFCVYWDIELREVPMSEEHLSINTDIIMDYVDEYTIGIVGILGITYTGKFDDIMTLNDLVEDYNNTHDNEVVIHVDGASGAMFTPFVEPGLEWDFRLPNVVSINTSGHKYGLVYPGVGWILWRDKEYLPEELVFDVSYLGGHMPTMAINFSRSASQIIGQYYNFLRFGYEGYRQIHMRTRDGALQLSQAVAETGLFEIYNDGANLPIVCYKLKDDANVAWTLYDLADRLQMKGWQVPAYPLPKEMGNTIIQRYVCRGDLGQNMVTAFKNDLSESIEELNNAHILYHDVNTSKTHGFTH

SEQ ID NO: 10932 - protein, 509 aa, Zea mays
  misc_feature (162)..(162): Xaa can be any naturally occurring amino acid
  misc_feature (188)..(188): Xaa can be any naturally occurring amino acid
  misc_feature (366)..(366): Xaa can be any naturally occurring amino acid
  misc_feature (377)..(377): Xaa can be any naturally occurring amino acid
  misc_feature (430)..(430): Xaa can be any naturally occurring amino acid
  misc_feature (469)..(469): Xaa can be any naturally occurring amino acid
MATANGSSKGSFEVPKVEVRFTKLFIDGKFVDAVSGKTFETRDPRTGEVIASIAEGDKADVDLAVKAAREAFDNGPWPRMTGYERGRILHRFADLIDGHVEELAALDTVDAGKLFAVGKARDIPGAAHLLRYYAGAADKVHGATLKMAQRMHGYTLKEPVGXVVGHIVPWNYPTTMFFFKVGPALAGXGAPVVVKPAEQTPLSALFYAHLAREAGVPAGVLNVVPGFGPTAGAAVAAHMDVDKVSFTGSTEVGRLVMRAAAESNLKPVSLELGGKSPVIVFDDADLDMAVNLVNFATYTNKGEICVAGTRIYVQEGIYDEFVKKAAELASKSVVGDPFNPSVSQGPQVDKDQYEKVLRYIDIGKRXEGATLVTGGKXPCGDNKGYYIEPTIFTDVKDDMTIAQDEIFGPVMALMKFKTVEEVIQKANNTXRYGLAAGIVTKNIDVANTVSRSIRAGAIWINCYFAFDPXDAPFGGYKMSGFGKDMGMDALDKYLQTKTVVTPLYNTPWL

SEQ ID NO: 10933 - protein, 214 aa, Arabidopsis thaliana
MMSELDLGTSQRMTETHRTTTTFLDLLRRQMSGHDLTRRKRTLKERLRFKCIGCCGPTWNLRLTNNTTLHSPTSRDDEIEELQIETGLVLESDHGSGTGMNLATALEAERYNRGESTEAEADMTPRRVSLMRLLEETAEKIVDDDGKETEILTASIGTLTGNDSVCCVCMGRKKGAAFIPCGHTFCRVCSRELWLNRGSCPLCNRPIIEILDIF

SEQ ID NO: 10934 - protein, 589 aa, Glycine max
MSSASLKEMRNGGEDYSNGHGGGGVRDLYGEDCATEDQLITPWTFSVASGCSLLRDPRYNKGLAFTEGERDAHYLRGLLPPAIFNQELQEKRLMHNLRQYEVPLHRYMAMMDLQERNERLFYKLLINNVEELLPVVYTPTVGEACQKYGSIFRRPQGLYISLKEKGKILEVLKNWPEKSIQVIVVTDGERILGLGDLGCQGMGIPVGKLSLYTALGGVRPSSCLPITIDVGTNNEKLLNDEFYIGLKQKRATGQEYAELLEEFMHAVKQNYGEKVLIQFEDFANHNAFDLLEKYSSSHLVFNDDIQGTASVVLAGLLASLKLVGGTLVDHTFLFLGAGEAGTGIAELIALEISKQTKAPVEETRKKIWLVDSKGLIVSSRLESLQQFKKPWAHEHEPVKSLLDAVKAIKPTVLIGSSGAGKTFTKEVVETMASLNEKPLILALSNPTSQSECTAEEAYTWSKGKAIFASGSPFDPVEYEGKLFVPGQANNAYIFPGFGLGLIISGAIRVRDEMLLAASEALAAQVSQENYDKGLIYPPFSNIRKISAHIAAKVAAKAYDLGLASHLPRPKDLVKYAESCMYSPGYRSYR

SEQ ID NO: 10935 - protein, 360 aa, Lolium perenne
MGSTAADMAASADEDACMFALQLASSSVLPMTLKNAIELGLLEILVAAGGKSLTPTEVAAKLPSAANPEAPDMVDRILRLLASYNVVTCLVEEGKDGRLSRSYGAAPVCKFLTPNEDGVSMAALALMNQDKVLMESWYYLKDAVLDGGIPFNKAYGMSAFEYHGTDPRFNRVFNEGMKNHSIIITKKLLELYHGFEGLGTLVDVGGGVGATVAAIAAHYPTIKGVNFDLPHVISEAPQFPGVTHVGGDMFKEVPSGDTILMKWILHDWSDQHCATLLKNCYDALPAHGKVVLVQCILPVNPEANPSSQGVFHVDMIMLAHNPGGRERYEREFQALARGAGFTGVKSTYIYANAWAIEFTK

SEQ ID NO: 10936 - protein, 351 aa, Lolium perenne
MADEEACMFALQLANSAVLPMAIRTSIELGLLETLVGAGGKLLTPEEAVKKLPSKAKHPDAASMIDRMLRVLASYKVVTCEVEEGKDGSLSRRYGATPVCRWLAPNEDGASMAPFALLTQDRVFMEAWCHMKDAILEGGSAFHRAFGTSWFEYAGQDARFNRLFNEAMEHHSVILTKKLLELYKGFDGIGTLVDVAGGVGAVIHAITSKYPSIKGINFDLPHVIADAPPYPGVEHVSGDMFKKMPSGDAILMKWILNCFSDDECATLLKNCYDALPAHAKVINVECILPVNPDATNGAQALIAVDLSLLVYSPGGKERYHRDLEKLAKGAGFTSVTATYIFADFWAMEYTK

SEQ ID NO: 10937 - protein, 95 aa, Glycine max
TDRPVGPWLKVKNPEHWAKRSSLKDVIADAFLQQILLRPAEYDVIACMNLNGDYISDALAAQVGGIGIAPGANIGDECALFEATHGTAPKYAGQD

SEQ ID NO: 10938 - protein, 361 aa, Lolium perenne
MGSTAAEIAASADEEACLYALQLGSSSILPMTLKNTIELGLLETLMAAGGKSLTPTEVAAKLPCAAKNPEAPDMVDRMLRLLASYNVVSCLVEEGTDGRLSRRYGAAPVCKFLTPNEDGVSMAALALMNQDKVLMESWYYLKDAVLDGGIPFNKAYGMSAFEYHGTDPRFNRVFNEAMKNNSIIITKKLLQLYDGFQGLGTLVDVGGGVGATVAAITAHYPTIKGINFDLPHVISEAPPFPGVTHVGGDMFKKVPLGDAILMKWILHDWSDQHCGTLLKNCYDALPMHGKVVLVECILPVNPEAKPSSQGVFHVDMIMLAHNPGGRERYEREYEALARGAGFAGFKSTYIYANAWAIEFTK

SEQ ID NO: 10939 - protein, 207 aa, Zea mays
MAMPDLTATVIQISGPRGELPVLGAGRRRCVWQFNFREFDDARDIFASDSIELLRRSGIDLRLNAERGVDARRFAELLMSSGVVLNDSVYWVTFHAGYDFGYLLKILTCNCLPDTQAGFFKLMKIYFPTVYDIKHLMKFCNSLHGGLNKLAELLDVERVGESHQAGSDSLVTSCAFWKLKDSFFTGSTEKYAGVLYGLNAEIDVSAH

SEQ ID NO: 10940 - protein, 386 aa, Parachlamydia sp. UWE25
MSEVLFEITKESLETGLRGYPVGYCTTSSVDPVKGLFYAGHPVSEIDQWEPEQVIYLLYHGYVGKPEEVSRFSQDLLIRANCSTALIESIEKLPRNIHPMKLFSIALLLASGFEGKNDYHEDYLNLIAKVPEIAATVINHHAGWGKTKQSQPQLGYMENFTQMLNVPDANQQELARAFKFFNVLHYDHGGGNLSAFVGKAVASGLEDLYGSMSAAMCALAGPRHGKANQDCLTFVHQLVEELGEHSTEEELERLIRAHLDKGELIFGFGHAVLRVEDPRATLLYEVTNQYYASHALVKMAQLLRKVGSKVLQNNPKISDPYPNVDAISGILLTAAGFPCSEYYTVLFGLARVVGIGRQIVYERKEAREGKGTPIVRPKYFFKENKQ

SEQ ID NO: 10941 - protein, 459 aa, Glycine max
  misc_feature (122)..(122): Xaa can be any naturally occurring amino acid
  misc_feature (149)..(149): Xaa can be any naturally occurring amino acid
MDRRTGSTRNILFNKYEIGKLLGQGNFAKVYHGRNLSTNESVAIKVIKKERLQQKERLVKQIKREVSVMSLVRHPHIVELKEVMANKAKIFMVVEYVKGGELFAKVAKGKMKEDVARKYFQXQLISAVDFCHSRGVTHRDLKPENLLLXDENEDLKVSDFGLSALPDQRRSDGMLLTPCGTPAYVAPEVLKKKGYDGSKADIWSCGVILFALLSGYLPFQGENVMRIYSKSFKADYAFPEWISPAAKNLISNLLVVDPQKRYSIPDIMKDPWFQIGFLRPIAFSMKESALEDNIDFSGDDVPSPGSDDGNSSSNNEDGELTGAKPARPSYNAFEIISSLSHGFDLRNLFETRKRSPSMFISKFSASAVMAKLEGVAKKLNFRVTGKKEFVVRMQGATEGRKGKLAMTVEVFEVAPEVAVVEFAKSAGDTLEYIKFCEDQVRPSLKDIVWSWQGDANCHQ

SEQ ID NO: 10942 - protein, 178 aa, Oryza sativa (japonica cultivar-group)
MYLLSPRNGDEEDEQEEIQELISDDEPPNLKLASCATAASSSSSSGSDMEKGRGKACGGGSTAPPPPPPSSSGKSGGGGGSNIREAAASGGGGGVWGKYFSVESLLLLVCVTASLVILPLVLPPLPPPPSMLMLVPVAMLVLLLALAFMPTTTSSSSSAGGGGGGGRNGATTGHAPYL

SEQ ID NO: 10943 - protein, 256 aa, Glycine max
  misc_feature (186)..(186): Xaa can be any naturally occurring amino acid
CSQLQSYWLQVAVCRQFKPVTLELGGKSPFIVCKDADVDAAVEASHFALFFNQGQCCCAGSRTFVHESIYGEFVEKAKARALKRVVGDPFKNGVEQGPQIDSVQFEKIMKYIRSGVESGAQLESGGQRIGSKGYYIQPTVFSNVQDNMLIAKDEIFGPVQSILKFKDLEEVIRRANATSYGLAAGXFTKNMDTANTLMRALQAGTVWINCYDVFDAAIPFGGYKMSGQGRVRGIYSLRSYLQVKAVVTALKNPAWL

SEQ ID NO: 10944 - protein, 116 aa, Hevea brasiliensis
MAALKMVSFLVLCMLVAAPMTAQAITCGQVQSALVPCLSYLKTTGPTPPATCCNGVRTINNAAKTTADRRTACQCLKSAAGSVKGLNPTTVAGLPGKCGVNIPYKISLSTNCATVK

SEQ ID NO: 10945 - protein, 180 aa, Medicago sativa
MALISSAAVTTVNRASSAQANLVAPFTGLKSSAGFPVTKKTNNDITSIASNGGRVNCMQVWPPVGKKKFETLSYLPPLTEEQLAKEVEYLIRKGWIPCLEFELEKGFVYRENHRSPGYYDGRYWTMWRLPLFGATDSSQVLKELADCKAEYPDSFIRIIGFDNVRQVQCISFIAHTPKNY

SEQ ID NO: 10946 - protein, 357 aa, Agrobacterium tumefaciens str. C58
MRALRFHAAKDLRIEDIAEPKRPGPGQVLVRNRFVGICGTDLHEYSYGPIFIPTEPHPFTGAHGPQILGHEFGGVVEAIGDGVTSVNVGDRVSIQPLIMPRSGDYFADRGLFHLSTQLALVGLSWDGGGMAEAALVNEYNVQKIPDEMTDEEAALVEPSAVAVYACDRGGVTAGNSVLVTGAGPIGMLTLLAARAAGATQLFVSDLNDARLELARNVIRDVITINPKRDNVGDVVRSATEGKVGCDVAIECVGNEHALKACVDAVRKQGVVVQTGLHPHENPIDWFQVTFRDLEIKGSWAYPTHYWPRVIRLIASGLLPATKIVTKRITLDTAVTEGFDALLDPAGTHLKILIDLSK

SEQ ID NO: 10947 - protein, 395 aa, Zea mays
MEVAMVVSARASLLILVLSLCSPYKFIQSPMDLGPLNLLPTTSTAAASSDFGRILFRAPAAVLRPQSPRDISMLLSFLSGSPSLSRVTVAARGAGHSIHGQAQAPDGIVVETRSLPGEMEFHHVRGGGEGRASYADVGGGVLWIELLERSLKLGLAPRSWTDYLYLTVGGTLSNAGISGQTFKHGPQISNVLQLEVVTGLGQFGIITRARILLQEAPEKVTWVRAFYDDLGAFTRDQELLVSIPDSVDYVEGFMVLNERSLHSSSIAFPASVDFSPDFGTRSSPRIYYCVEFAVHHHHGYQKQSQAAVEAISRRMSHMASQLYSVEVSYLDFLNRVRMEEVSLRSAGMWEEVHHPWLNMFVPKPGVAGFRDLLMDNVSPDSFQGLILIYPLLRDK

SEQ ID NO: 10948 - protein, 176 aa, Neurospora crassa
MGYYDDDAHGHVEADAAPRATTGTGTGSASQTVTIPCHHIRLGDILILQGRPCQVIRISTSAATGQHRYLGVDLFTKQLHEESSFVSNPAPSVVVQTMLGPVFKQYRVLDMQDGSIVAMTETGDVKQNLPVIDQSSLWNRLQKAFESGRGSVRVLVVSDHGREMAVDMKVVHGSRL

SEQ ID NO: 10949 - protein, 97 aa, Zea mays
MDEEEHEVYGQEIPEDGDMDGADVDMAASGDDAAKLQELDEMKRRLKEMEEEAAALRDMQAKVAKEIGEIEPTNHGTAWQPCPAPPTAPACPFPCVT

SEQ ID NO: 10950 - protein, 207 aa, Methanococcoides burtonii DSM 6242
MAFQIVFAAIALAILTSGVAERIKLSSFIVFGLLWTTLVYDPLAYWAWGDGWVGSMGALDFAGGTVVHISSGFGALALSFVIGKRIGFGKYSMEPENITTTLLGGALLWFGWFAFNAGNALAANAFVVTLISASSGALTWMGASWIKGKSSSLGMNSGAIAGLVAITPACGFVGPLAAIIIGGSAGILCYGTLLFCIYKKFDESLDA

SEQ ID NO: 10951 - protein, 354 aa, Oryza sativa (japonica cultivar-group)
MTPAADGDDDETTCIRALELIFTFVVPMTLKATIKLGLLDALTGGGHALTADELAAAAQLPAEAASSVDRMLRLLASLDVVKCAPTDTGGEAAVRRYTPAPVCRWFAGERSLAPLAMFLLDDDYLSTWNQLPAAVAGGDGQVAFEKARGMPMFEYMGTNRRLNTLFNQAMVQQSTVVIGKLLERFQGFDGVSVLVDVGGGTGATLEMITSRYKNITGVNFDLPHVIAQAPSLPGVKHIAGNMFESVPNGDAIFLKSMLHLHNDEDCIKILKKCHQALTHNGKVIAVEILLPAIPEPVPTAQNPFRMDMIMLNNHWGGKERTEPEFAKLAVECGYTGVFQATYIFANYWALEFSK

SEQ ID NO: 10952 - protein, 406 aa, Azospirillum brasilense
GFAGDAAARYSSTLGVAAVTYGAGAFNMVNAVAGAYAEKSPIVVISGAPGTTEGNAGLLLDHQGRTLHTQFQVFKEITVAQARLDDPAKAPAEIARVLGAARALSRPVYLEIPRNMANAEVEPVGDDPAWPVDRDALAPAPDEVLAAMRSATSPVLMVCVEVRRYGLEAKVADVAHGLGVRSVTTFMGRGLLADAPTPPLGTYIGVAGDAEITRLVEESDGLFLLGAILSDTNFAVSQRKIDLRKTIHAFDRAVTLGYHTYADIPLDGLVDALLERLPPSDRTTRGKEPHAYPTGLQADDGPIAPMDIARAVNDRVRAGQEPLLIAADMGDCLFTAMDMIDAGLMAPGYYAGMGFGVPAGIGAQCVSGGKRILTVVGDGAFQMTGWELGNCRRLGIDPIVILFNNA

SEQ ID NO: 10953 - protein, 308 aa, Triticum aestivum
NIQVDPSGQVQWLQQQLVPQLQQPLSQQPQQTFPQPQQTFPHQPQQQVPQPQQPQQPFLQPQQPFPQQPQQPFPQTQQPQQPFPQQPQQPFPQTQQPQQPFPQQPQQPFPQTQQPQQPFPQLQQPQQPFPQPQQQLPQPQQPQQSFPQQQRPFIQPSLQQQLNPCKNILLQQCKPASLVSSLWSIIWPQSDCQVMRQQCCQQLAQIPQQLQCAAIHSVVHSIIMQQQQQQQQQQGMHIFLPLSQQQQVGQGSLVQGQGIIQPQQPAQLEAIRSLVLQTLPSMCNVYVPPECSIMRAPFASIVAGIGGQ

SEQ ID NO: 10954 - protein, 228 aa, Pisum sativum
PVYISISCNLAGIPHPTFSREPVPFSLSPKSSNQMGLEAAVEAAAEFLNKAVKPVLVAGPKLRVAKASEAFTELADKSAYPYAVMPSAKGLVPENHQHFVGTFWGAVSTSFCAEIVESADAYLFAGPIFNDYSSVGYSLLLKKEKSIIVEPNRVVIGNGVAFGCILMKDFLSALAKRIKRNNTAYENYHRILVPEGVPVESEPREPLRVNVLFQHIQNMLSSKTAVIA

SEQ ID NO: 10955 - protein, 400 aa, Zea mays
  misc_feature (370)..(370): Xaa can be any naturally occurring amino acid
  misc_feature (385)..(385): Xaa can be any naturally occurring amino acid
ACLQAVIKRLMTDVPFGVLLSGGLDSSLVASVTKRHLVKTDAAGKFGTELHSFVVGLENRARDGTLTFFFTSLSTTDRPARTFQGSPDLKAAREVADYLGTTHHEFHFTDGIDAIEEVIYHDETYDVTTIRASTPMFLMARKIKSLGVKMVLSGEGSDELLGGYLYFHFAPNKEEFHRETCRKVKALHQYDCLRANKATSAWGLEVRVPFLDKEFINVAMGMDPEWKMYDKNLGRIEKWVMRKAFDDDEHPYLPKHILYRQKEQFSDGVGYNWIDGLKSFTEQQVTDEMMNNAAQMFPYNTPVNKEAYYYRMIFERLFPQDSARETVPWGPSIACSTPAAIEWVEQWKASNDPSGRFISSHDSAATDHTXAVSRRWPTAAATAPXNGTVNGKDVAVAIAV

SEQ ID NO: 10956 - protein, 177 aa, Triticum aestivum
  misc_feature (12)..(12): Xaa can be any naturally occurring amino acid
  misc_feature (64)..(64): Xaa can be any naturally occurring amino acid
  misc_feature (96)..(96): Xaa can be any naturally occurring amino acid
  misc_feature (162)..(162): Xaa can be any naturally occurring amino acid
MGPPVMASLATXRGRFQGCKSSAALPVSARSNGASLGGVSNGGRIRCMQVWPIEGIKKFETLSXYLPPLSTEALLKQVDYLIRSKWVPCLEFSKVXGFIFREHNTSPGYYDGRYWTMWKLPMFGCTDATQVINEVEEVKKEYPDAYVRIIGFDNMRQVQCVXLIAFTPPPSEESGKA

SEQ ID NO: 10957 - protein, 295 aa, Candida albicans SC5314
MPAQLQVNTDYFTLNNGNKIPAVGLGTWQATNEDEAYRAVLAALKNGYKHIDTAAIYGNEEQVGKAIKDSGVPREELFVTTKLWNADHKNIEEALETSLKKLGLNYVDLYLIHWPASIDKSTNKPYTDFDYVDTYRGLQKVYKNSKKIRAIGVSNFTKKKLERLLSSEGVDVVPAVNQIEAHPLLTQPELYDYLKEKGIVLEAYSPLGSTNSPLFKNETIVKIAEKNGVEPAQVLVSWAIQRKTVVLPKSVTESRVISNLKTFTLPSEDFETLNKLSEKDGVVRTCNPAFNNFDD

SEQ ID NO: 10958 - protein, 289 aa, Candida albicans SC5314
MSAQLKTNNDRIALNNGNKIPVIGLGTWESNKDAFLTALKLGYRHIDTATIYKNEEQVGQAIKESGIPREELFITTKVWNNDHKNVEQALETSLKKLGLDYVDLYLVHWPVSIDKTTKEPYPDYDYVDTYKELQKIYKTTTKIKSIGVSNFTKSQLERLLSADGVDVVPAVNQVEAHPLLPQPELYEYLKEKGITLEAYSPLGTSSSPLIKNKTIVEIADKNGVDPAQVLISWAVQRKTVVLPKSVTESRLVSNLKTFELSAEDFDTLNKLSEKEGITRIINPFKNFQD

SEQ ID NO: 10959 - protein, 354 aa, Gibberella zeae PH-1
MSLPSTMKAVVFDGLYKISVQDRPVPQIRDGRDIIIKVHAAGLCGSELHIYRGHQPSGTGFIMGHEFTGTVVQVGSDVKTIHIGDKVVAPFTASCGNCFFCNNGCSARCVESQLFGCEILNGGQAEYVRIPMADGTAVKAPETISDEALLLMADIFPTGFYGVKSAMELVPSQNIQEATMVVVGCGPVGLCAILAATHFKPRHLFAIDSVESRLEQARKLGAEPLNFETDRAGLEARIREVTEGRGADMVVEVVGQAPALRTAFDIVRPFGAISSIGVHNKEIPWTGDDAYTRNIRVQMGRCPVRSVFNEALHLLEQKQDKIGFLFDHKMPLAQAPEGYTLFEQRKTQKVVFTL

SEQ ID NO: 10960 - protein, 506 aa, Lithospermum erythrorhizon
MALPAIPLAIIIFLIISYKLYQKLRLKLPPGPRPLPIIGNIYQVKPVKFRCFYNWSKTYGPIFSIYYGSQMNVIVSTTELAKEVLKENDQHLADRFRTRSSASMSRGGKDLIWADYGPHYVKVRKLCNVELFSPKRLEAIRPMREDEYTALVESIYKDCTKPELKGKSLLVREYLSSVAFNNITRLAFGKRFMDSNGVVNEQGQEFKKITHDGIKITAKLSIAEYIPWIRWMFKVEQDALDKFAADRDHLTRVIMEEHIKSGNTKQHFVDALLTLQKQYDISEDTIIGLLWDMIAAGMDTATISTEWAMAELVRNPRVQRKAQEELDRVVGPDRIMTEADVPKLPYLQCIVKESLRLHPPTPLMLPHRASANVKIGGYDIPKGSIVHVNVWAIARDPAYWKNPEEFRPERFMEEDIDMKGTDYRLLPFGAGRRICPGAQLAINLITSSLGHLLHQFTWSPQPGVKPEEIDLSENPGTVTYMRNPVKAVVSPRLSAVHLYKRVESDM

SEQ ID NO: 10961 - protein, 449 aa, Xylella fastidiosa Dixon
MNPTLIVNARLVNEGREFDSDLRIENGRIARIDTGLSAQSKDIVIDAAGRRLLPGMIDDQVHFREPGLTHKGDIASESAAAVAGGLTSFMDMPNTNPPTLGAAALQAKYDAARGRAWGNYGFYLGASNDNLAAIQALDPKTSPGIKVFMGASTGNMLVDNETTLEGIFRHAPTPIITHCEDTPTINATLAKYHSRYGNTLSAEQHPDIRSRQACLKSSQLAVSLAKKNGTRLHVLHISTADELRLFEAGPLVDAAGKRRKQITAETCIHFLHFDRMDYARLGNLIKCNPAIKEASDREALIAALAKDVIDVLATDHAPHTWEEKQQPYAQAPSGLPLVQYALVAALELVHAGRLSVTEIVRKFAHAPAQLFDVTERGFLREGYWADLVLVEDTPFTVKRQEILSKCGWSPFEGATFRSRIASTWVNGNHVWDGNRLVGVPNGQRLEFDR

SEQ ID NO: 10962 - protein, 695 aa, Glycine max
  misc_feature (13)..(13): Xaa can be any naturally occurring amino acid
  misc_feature (28)..(28): Xaa can be any naturally occurring amino acid
  misc_feature (36)..(36): Xaa can be any naturally occurring amino acid
MPVLACCVDACSXPPGYAFAGDISFPAXPIAFTGVXPPATADDTNNSNNHWSPSLSAALYNVDGWGGPYFAVNTAGNISVRPHGSDTVSHQEIDLLKIVKKASDPKSLGGLSLQLPLIARFPDVLKNRLESLQSAFDYAIQSGGYESHYQGVYPVKCNQDRFVVEDIVKFGSPFRFGLEAGSKPELLLAMSCLCKGNPDGLLICNGFKDAEYISLALVANKLALNTVIVVEQEEEVDLIVELSKKLCIKPVIGLRAKLRTKHSGHFGGIFRRRGKFGLTTARVLRVVKNLDLAGMLDCLQLLHFHIGSQIPSTALLADGVGEAAQIYCELVRLGANMRVIDIGGGLGIDYDGSKSCDSDISVEYGLEEYAAAVVHAVQCVCDRSVKHPVICSESGRAIVSHHSVLIFEAVGTSSTNGGGAPPALSAHYLAEELSEDYGYLSELAFRGDYETCLVYTEEMKERCVEQFKQGTVCMEQLAAVEGLCELVRKAVGAAESVRRYHVNLSIFTSVPDAWGIEQVFPIIPIHRLDEKPSVRGILSDLTCDSDGKIDKFINGESSLPLHEMEGGRTYYLGMFLGGAYEEALGGVHNLFGGPSVVRVSQSDGPHSFAVTRAVPGPSCGDVLRVMQHQPELMFETLKHRAQEYVSHDNAAALLAAGLARTFDRMPYLLSLSSFVADDVAAAVPAAQDLGEQWSY

SEQ ID NO: 10963 - protein, 114 aa, Brassica napus
MAIKNSFSLLLSSLMVFALIAIPTISGQPSGTWCVANPKIQDPVVQAALGWACQQSEAYCSRIQLGQNCYSPNTLRDHASVVFNTYYQQNKNQPGSCDFNSAAVITNTDPSHDT

SEQ ID NO: 10964 - protein, 196 aa, Schizophyllum commune
MQAIKCVVVGDGAVGKTCLLISYTTNAFPGEYIPTVFDNYSANVMVDGKTISLGLWDTAGQEDYDRLRPLSYPQTDVFLICFSLVSPPSFENVRTKWYPEISHHAPQTPVVLVGTKLDLREDPATIEKLRDRRMSPIQYSQGVAMMKDIGAVKYLECSALTQKGLKTVFDEAIRVVLYPSARSDNKRSKGRSCIVA

SEQ ID NO: 10965 - protein, 168 aa, Zea mays
IALLLGLKGIHFVDEDGNDFCLVSVDDEYIIIGSANINQRSMDGARDSEIAMGAYQPYHLATRQPARGQIHGFRMSLWYEHLGMLEDVFQRPESVECVQKVNEVAEKYWDLYSSDDLEQDLPGHLLSYPIGVTADGSVTELPGMENFPDTRARVLGNKSDYLPPILTT

SEQ ID NO: 10966 - protein, 214 aa, Zea mays
GMRAFEAAKGAPAPRIGVPEYLERVHRYAALDPECYVVAYAYVDMAAHRRPAAAVASRNVHRLLLASLLVASKVLDDFHHSNAFFARVGGVSNAEMNKLEMELLDLLHFAVAVDHRVYHRYREHLETEMLRRDYHHGLMPVSGSAAPSKPRTTASSVVNNPPLPPPLTEGRRPAEAGDDGDDREEHEYRKVPNGLPAVNTMTTSSLRELWTFDY

SEQ ID NO: 10967 - protein, 240 aa, Brassica napus
VDPRVRAMPRLLPDVSDLTSFWNLFTVVPVLVTAFICHYNVHSIQNELDDPAQIRPVVRSALMLCSSVYIMTSIFGFLLFGDDTLDDVLANFDTDLGIPLGSVLNDAVRVSYALHLMLVFPIVFYPLRINIDGLLFPSARPLTTSNVRFGCLTAGLISVVFLGANFIPSIWDAFQFTGATAAVCLGFIFPASIILKDRHGRATSRDTTLAVFMIVLAVLSNAIAIYSDAYALFKKNAPRE

SEQ ID NO: 10968 - protein, 433 aa, Caldococcus noboribetus
MVSHPCTADEAKPPSEGQLARFENGKLIVPDNLIVAYFKGDGIGPEIVESAKKVLDAAVDKAYGGTRRIVWWEVTAGEEAQKECGSLLPDGTLQAFKLARVNLKGPLTTPVGGGFRSLNVTLRMVLDLYSNVRPVKWYGQPTPHCHPENIDWVIFRENTEDVYAGIEWPFDSPEAQKIRDFLKKEFGIELTPDTGIGIKPISKWRTQRHVRRAMEWAIRNGYKHVTIMHKGNIMKYTEGAFRQWAYDLILSEFRDYVVTEEEVNTKYGGKAPEGKIIVNDRIADNMLQQIITRPGEYNVIVTPNLNGDYISDEANPLVGGIGMAAGLDMGDGIAVAEPVHGSAPKYAGKNVINPTAEILSGMYLLSDFVGWPEVKLLVEYAVKQAIAHKQVTYDLAREMGGVTPISTTEYTDVLVDYIRHADLKPSRASEGLP

SEQ ID NO: 10969 - protein, 483 aa, Parachlamydia sp. UWE25
MMAAQLIPITVAEGDGIGPEIMDATLRILKAAGAPLDIKNVEIGEKVYLSGQPTGIENSTWDLIRQSKALLKAPITTPQGGGFKSLNVTIRTTLGLYANVRPCVAYYPFVETKYPGMNVVIVRENEEDLYTGIEYRQTPDVYEALKLITRPGCEKIIRYAFEYAQIYHRKKVTCFTKDNILKLTDGLFHKIFDEIGAEYPQIEKEHWIVDIGAAKLADTPTAFDVIVMPNLYGDILSDVAAQIAGSVGLAGSANIGNSGAMFEAIHGSAPRRAGQNLANPSGLLLAAIQMLVHLEQSNLAELIHNAWLKTLEEGIHTYDIFKEKTSKQKVGTKEFANAVTARLGKKPETLPAAHYSTSFHIKHSNFSSLKNFKQELYGIDIFIKWSEDVETLATLLQSTSNHDLKLKMINNRGVKVWPNKMPETACIDNWRCRFISSTNKIVSQEQILNLLNRLVQKKLTLTQTAYLFAFDGQAGYTLAQDEQ

SEQ ID NO: 10970 - protein, 460 aa, Emericella nidulans
MALPLRTARHASRLAQTIGRRGYATAEPDLKSALKAVIPAKRELLAEVKKQGDEVIGEVKVSNVIGGMRGLKSMLWEGSVLDADEGIRFHGKTIKDCQKELPKGPTGTEMLPEAMFWLLLTGEVPSTSQVRAFSKQLAEESHLPDHILDLAKSFPKHMHPMTQISIITAALNTESKFAKLYEKGINKADYWEPTFDDAISLLAKIPRVAALVFRPNEIDVVGRQKLDPAQDWSYNFAELLGKGGANNADFHDLLRLYLALHGDHEGGNVSAHATHLVGSALSDPFLSYSAGLLGLAGPLHGLAAQEVLRWILAMQEKIGTKFTDEDVRAYLWDTLKSGRVVPGYGHGVLRKPDPRFQALMDFAATRKDVLANPVFQLVKKNSEIAPGVLTEHGKTKNPHPNVDAASGVLFYHYGFQQPLYYTVTFGVSRALGPLVQLIWDRALGLPIERPKSINLLGLKK

SEQ ID NO: 10971 - protein, 213 aa, Zea mays
MGCFHSTAKRQHPGYEDPVHLASQTAFSVSEVEALFELFKSISGSVIDDGLINKEEFQLALFKNQRKENLFANRIFDLFDVKKRGVIDFGDFVRALNVFHPNIPMDEKVDFSFKLYDMDSTGFIERKEVKQMLIALLGESEMRLSDDIIETILDKTFSDADANQDGKIDRTEWENFVTRNPSLMKIMTLPYLKDITTTFPSFVFNSEVDDLVT

SEQ ID NO: 10972 - protein, 138 aa, Oryza sativa (japonica cultivar-group)
MVPAARSGWPAAAAVLVVVLVLSSPPGTSTVVVARAALSCSTVYNTLLPCLPYVQSGGAVPAACCGGIRSVVAAARTTADRRAACTCLKNVAAGAAGGPYISRAAGLPGRCGVSVPFKISPNVNCNAYVKTKNQINLY

SEQ ID NO: 10973 - protein, 85 aa, Glycine max
VNRAQARMYVICTGHKYMVGFPTRKTNNDITCIVSNGGRVQCMQVWPPFGKKKFETLSYLGDADDAQSLEELQFRFRNEGSLAWI

SEQ ID NO: 10974 - protein, 404 aa, Rickettsia sp. California 2
KIRGKIFRLPILKASIGEDVIDISRVSSEADCFTYDPGFMSTASCQSTITYIDGDKGILRHRGYDIKDLAEKSDFLEVAYLLIYGELPSIEQYNNFTKQVAHHSLVNERLHYLFQTFCSSSHPMAIMLAAVGSLSAFYPDLLNFKEADYELTAIRMIAKIPTIAAMSYKYSIGQPFIYPDNSLDFTENFLHMMFATPCTKYKVNPIIKNALNKIFILHADHEQNASTSTVRIAGSSGANPFACVSTGIASLWGPAHGGANEAVINMLKEIGSSENIPKYIAKAKDKNDPFRLMGFGHRVYKNYDPRAAVLKETCKEVLKELGQLENNPLLQIAIELEAIALKDEYFIERKLYPNVDFYSGIIYKAMGIPSQMFTVLFAIARTVGWMAQWKEMHEDPEQKISRPR

SEQ ID NO: 10975 - protein, 496 aa, Psychrobacter sp. 273-4
MSTAAKNTQANTYTDFHLQYIAGEWKKGDDDSINTNTNPFNGETLVEIQQATDKQLDEAYQAASDAQKQWAKQTPNERAAILYKVVSIFDQRQDEIVDWLIKESGSTRIKAMVEFSSARAITLEAASFPNRVHGEIRPSNTPGKENFIYREPMGVIAVISPWNFPLHLTQRSIAPALALGNAVVLKPASDTPITGGLLLAKIFEEAGLPKGLLNVVVGSGSEIGDAMVTHHVPSLVSFTGSTSVGKHIGELANGGEYIKQVALELGGNSPFVVLKDADIEQAVKAAAFGKFLHQGQICIAINRIIVEDEIYDDFVTRFVAHVKTLNVGDPNKADTAVGPIINKKQVASLKEKIVKAKDEGAKMLLSGEIKGQVVPPHVFSDVTREMDLSCNEVFGPLVGIIRAKDEDDALSIANDSMYGLSSAVFTQDMAKGLRFARGIKAGMTHINDISVNDESNAPFGGEKNSGIGRFNGEWILEEFTTLHWISMQHTPRDYPF

SEQ ID NO: 10976 - protein, 562 aa, Triticum aestivum
  misc_feature (350)..(350): Xaa can be any naturally occurring amino acid
DRATEEQLVTPWTVSVASGYNLLRDPRYNKGLAFTEKERETHYLRGLLPPAVTSQELQERKIMHNIRQYQLPLQRYMAMMDLQEGNERLFYKLLIDNVEELLPIVYTRTGGAGGRKYGSIFSRPQGLYISLKEKGKILEVLKNWPERSIQVIVVTDGERILGLGDLGCQGMGIPVGKLSLYTALGGVRPSACLPITLDVGTNNEELLNDEFYIGLRQRRAIGQEYADFLHEFMAAVKQNYGEKVLIQFEDFANHNAFDLLARYGTTHLVFNDDIQGTASVVLAGLVAALKLVGGTLAEHTYLFLGAGEAGTGIAELIALEMARQTKTPIDECRKKIWLVDSKGPRVRPRXGTRKESLQHFKKPWAHEHEHVGNLLDAVNAIKPTVLIGTSGKGQTFTQEVVEAISSFNEMPIILALSNPTSQAECTAEQAYTWSKGRAVFATGSPFDPVQYNGKTHVPGQANNAYIFPGFGLGVVMSGAIRVHDDMLLAASEALAQQVTQENFDKGLIYPPFSNIRKICAHIAANVAARAYELGLASRRPRPKDLVKYAESCMYSPIYRNYR

SEQ ID NO: 10977 - protein, 319 aa, Clostridium perfringens
MKKIAVLTSGGDAPGMNAALRAVTRMALHHGLEVMGVQRGYAGLINGELFKMDRKSVSEIINRGGTILRTARCLEFKQEEVREKAAQILKAYGVEALVVIGGDGSFMGAKLLSKLGVKTVGLPGTIDNDLSYTDYTIGFDTALNTVVDAINKLRDTSTSHERVSIVEVMGRNCGDLALYAGIAGGAEAIIVPEMPFDKDELIKTILEGRTNGKTHSIIVVAEGVGGSAELAKEIESVTGIETRATILGHIQRGGSPTADDIVLASRMGAKAVEVLLEGKTSKVIGIKENRIFDMDIDEALDIERSFDESLYEMANAINK

SEQ ID NO: 10978 - protein, 175 aa, Triticum aestivum
MAPTVMASSATSVAPFQGLKSTAGLPVSRRSNGASLGSVSNGGRIRCMQVWPIEGIKKFETLSYLPPLSTEALLKQVDYLIRSKWVPCLEFSKVGFIFREHNASPGYYDGRYWTMWKLPMFGCTDATQVINEVEEVKKEYPDAYVRIIGFDNMRQVQCVSFIAFKPPGCEESGKA

SEQ ID NO: 10979 - protein, 177 aa, Shewanella oneidensis MR-1
MMKFPLFILTSLMSTSVFAATCPSYLDVEVRKLHSEQSVNLCELTQGKPVLLINTASNCGYTSQFKALEALHKEYKDKGLVVIGFPSDDFFQEENDEKDTAKVCYINYGVTFTMLATSPVRGSDVNSVFKYLGDKAGAPKWNFYKYVVSGDGNTVMQFNSKVKPDSTELKQAIESVL

SEQ ID NO: 10980 - protein, 385 aa, Triticum aestivum
MEGGDARNGLTGTSQTTGSGVESPAKPLPPCCVKARAAAPESEAKCHATVVSGWFTETRSRCGKASKLQYYNNPMWPGETHSLKVDKILYQGKSPYQEVLIFESLTYGKVLVLDGIVQLTDKDECAYQEMITHLPLCSIPSPKKVLVIGGGDGGVLREIARHGSVESIDICEIDQLVIDVCKDFFPDLSVGFEDPRVRLHVGDAVEFLRNSPEGTYDAIIVDSSDPIGPAQELVEKPFFETIARALRPGGVLCNQAESMWLHTHLIQDMLSICCETFKGSVHYAWASVPTYPSGAIGFLLCAKEGRPVNFLAPINPIEKIEGAMTAGRDIRFYNTEMHRAAFVLPTFAKRELEAYSCSTIGAQQEEKSAEPAKVAVAPHSEILTA

SEQ ID NO: 10981 - protein, 465 aa, Yersinia pestis KIM
MKIVNHWIDGKNITSNDYFTTINPATGEVLADVASGGIKEINQAVAAAKSAFPHWANLPMKVRARLMRRLGELIEQQIPEIAQMETQDTGLPIYQTQNALIPRAAHNFEFFAEICQQMNGQTYPVDDQMLNYTLVQPVGVCALVSPWNVPFMTATWKVAPCLALGNTAILKMSELSPLTADKLGELALEAGIPAGVLNVVQGYGATVGDALVCHQDVRAISFTGGTATGNRIMQRAGLKKYSMELGGKSPVLIFDDADIERAMDAALFSIFSLNGERCTAGSRIFIQESLYSAFIQRFAERASRLRVGDPQDLDTQVGALISKPHWDKVSGYIQLGIEEGATLLAGGPDKPIDLPAHLRGGHFLRPTVLADVDNRMRVAQEEIFGPVACLIPFKNEDAGLRLARSIEAGMVFVNTQNVRDLRQPFGGIKASGTGREGGKYSFDVFAEVKNVCISMGEHPIPRWGM

SEQ ID NO: 10982 - protein, 145 aa, Arabidopsis thaliana
MGRGKIAIKRINNSTSRQVTFSKRRNGLLKKAKELAILCDAEVGVIIFSSTGRLYDFSSSSMKSVIERYSDAKGETSSENDPASEIQFWQKEAAILKRQLHNLQENHRQMMGEELSGLSVEALQNLENQLELSLRGVRMKKVLML

SEQ ID NO: 10983 - protein, 355 aa, Ustilago maydis 521
MPQYPSAAPGQKTFKLNTGAEIPVIGLGTWQSAPGEVAKAVESAIKAGYRHIVSMLTSLLTLTLGYVALHPLYIPFLAKDAAWIYGNENEVGQGIKASGVPRSELFVTTKIWCTYHRQPEACLDESLQRLGLDYVDLLLVHWPVPLVKRGDEKIPLNEDGSRAIDRDWSPEQTWELMEKLPATGKTKAIGVSNWSIAFLDKLLAKAKIVPAANQVELHPFLPQHELVKYCHDKGILPQAYSPLGSSGGPVLQDERVQSIAKAHKADPAQVVISWAAQRGVVALPKSVTPSRIETNGKLIVLSDEEMLELNELHKQEGKAVRLVKPNSDICSPPSETCLAPLNVADEALSYLRNSD

SEQ ID NO: 10984 - protein, 112 aa, Bartonella sp. Rf1563yn
ANEACLKMLQEIGSIKRIPEFIARAKDKNDPFRLMGFGHRVYKNYDPRAKIMQKTCHEVLKELNIQDDPLLDIAIELEKIALSDEYFIEKKLYPNVDFYSGITLKALGFPTE

SEQ ID NO: 10985 - protein, 202 aa, Methanopyrus kandleri AV19
MIALATGPRYRVPFRRRREGKTNYYKRRELIKADAPRLVARKTLNHNIAQIVDFAPHGDVTLASAHSIELRNKFGWKGHCGNTPAAYLTGYLCGLRALERGIERAVIDIGLHRPVRGSRVFAMLKGALDAGMDIPHGEEVLPPEDRIRGEHIANLARQIKEEDPEEYERRFSKYLERGLKPEELPEHFEEVKSKIEEEFGGA

SEQ ID NO: 10986 - protein, 382 aa, Ustilago maydis 521
MAPVANTKSSVELSALKDNLILMATHKKELELIKSTPAAPGPGMALVHVRATGVCGSDVHFWKHAGLGPWKIESQCALGHESGGIVIAVGEGVDNVVPGDRVAIEPGVPCFKATCDFCRTGKYNLCPTVDFYSVPPKDGTLKRYHEHPAGWLHKVPDNMSYEEIALLEPLSVTLQATLQAEISLGTPVLITGAGPIGIVQLLCASAAGATPIVITDVVKDRLDFAQKIVPGTFTYQIDPKKSPLESATEICKVFSKASGKHIAQGERDVQPAITMECTGIESSIQTASYATAASGLVFVIGVGANLQQIPFMHLSTNEITLKFLFRYRDTWPRAIRLVSSGKIDVKQIVTSRFPLEKAKEAVEHAADRSKFSVKTIIYDDQE

SEQ ID NO: 10987 - protein, 95 aa, Glycine max
  misc_feature (85)..(85): Xaa can be any naturally occurring amino acid
MEMFSSMISFPAVATVNRAGAGMVAPFTGLKSMAGFRTRKTYYVITSIASVGVRVQCMHVWPLIGWKTFATFHYLPDLDDALFAXVVAFLVRKGW

SEQ ID NO: 10988 - protein, 207 aa, Gibberella zeae PH-1
MATNITWHPSLSRKEREETRGQRGLTIWLTGLSASGKSTVATALEQHLLHLGVAAYRLDGDNVRFGLNKDLGFSEVDRNENIRRISEVAKLFADSSTIAITSFISPYRADRQVARQLHEQATQGGDAPIPFVEVYVDVPLEVAEQRDPKGLYKKARAGEIKDFTGISAPYEEPEKAEITIKTHENSVEECVAQIVEWLNEKGYLNKK

SEQ ID NO: 10989 - protein, 165 aa, Glycine max
  misc_feature (81)..(81): Xaa can be any naturally occurring amino acid
  misc_feature (89)..(89): Xaa can be any naturally occurring amino acid
MAIVYVLLVALITAASHAPHGAHGQTWHGDLAALAAAGKLRSDPNATLAASTDFGNITAALPGGVLFPSSPADVAALLRAXNTTVAWAXTISFRGRGQSVMGAGLALGGGGPHMPSLGGPGLRGGIQRGRGTAKNPPPGGNKRGDQPPGVKLWNAGGGPASRGTE

SEQ ID NO: 10990 - protein, 115 aa, Glycine max
  misc_feature (88)..(88): Xaa can be any naturally occurring amino acid
  misc_feature (100)..(100): Xaa can be any naturally occurring amino acid
QVNGEIYNHEELRKQLPNHKFRTGCDCDVIAHLYEEHGEDFVDMLDGIFSFVLLDTRDNSFIVARDAIGVTSLYIGWGLDGSVWISSXMKGLNDDCEHFXVFPPGHLYSSKERGF

SEQ ID NO: 10991 - protein, 318 aa, Pseudomonas putida
MSLNPDLAAYLQLVEAGRSAGKVLPMHALEADEARRQFEESSALIAGKADEPDCISDLSLTTRDGHTLPVRLYRPPQDDPALAGAALLYLHGGGYVVGSLDSHDTLCWNLAQDAGVPVIAVGYRLAPQWRFPTASDDALDAWRWLVEQAEALGIDAQRLAVVGDSVGGSLATILANQLAAQRELAAPRLQVMIYPVTDASCRRPSVQRYGSGYLLEAQTLEWFYQQYATVPADRLDPRFSPLLGSVASNSAPALMLIAECDPLHDQGVAYARHLEQAGVAVQLAVIPGVTHDFMRMGSIIEEADEGLVMVVEALQQHL

SEQ ID NO: 10992 - protein, 442 aa, Brucella suis 1330
MLTKTNAPSLDNFWMPFTANRQFKAAPRLLASASGMYYTDVDGNQVLDGTAGLWCCNAGHGRKRITEAVERQISTMDFAPIFQMGHNVAFDFAEKLAAIAPGGAEAKLDRVFFTNSGSESVDTALKIAIAYQRAIGQGTRTMVLGREKGYHGVGFGGISVGGLVNNRRVFPQIPADHLRHTLDIEKNAFSKGLPANGIELANDLERLVQLHGAEKIAAVIVEPMSGSAGVILPPKGYLERIRATADKYGILLIFDEVITGFGRLGTPFAVDYFGVVPDLVTTAKGLTNGAIPMGAVFAARKVYDGLMTGPENAIELFHGYTYSGHPVASAAGLATLEIYAEEGLLTRGAGLADYWQEALHSLKGAPNVIDIRNLGLVGAVELASRKDAPGARAYDIFVECFKKGLLIRVTGDVIALSPPLIIEKEQIDTIISVLGDAIKRAA

SEQ ID NO: 10993 - protein, 442 aa, Bradyrhizobium japonicum USDA 110
MLDETAGRAPGGAARWWLAQSLRALGAEIAARGGSLILRKGPAAGVIPEEARESGARAVYWNGIAQAPHQAIERRLEAALAKLGVDSQSFPGDLLVPPSAIRNKEGRGLRVFTPFWRRVLSLGDPPKPLPAPKQLRPGPKIVSDRLESWQLAPTKPDWAGGLRERWTPGEASARARLRDFLKTIARGYAGDRDRPDRVGTSGLSPHLRFGELSPRQVWHAARFAAAEDAALGPGIEKFLSELGWREFCRHLLHDHPDLATENLQTNFDGFPWQSDGKVLAAWQRGRTGYPIVDAGLRELWHTGVMHNRVRMVVASFLVKHLLIDWRDGEAWFWDTLVDADAGSNPANWQWVAGCGADAAPYFRVFNPQLQGEKFDPDGTYVRRWVPELQGLPAKLIHQPWQATPNELASAGVTLGKTYPQPIVDHARGRERALSAYAKIRKG

SEQ ID NO: 10994 - protein, 134 aa, Zea mays
PSIPYDPMALRKAFDKPVSLVTAVAVRHLAGTEAARRLGTKLHSFYVGLKGSPDLKAAREDDIDAIEDVIYHTEAYDVTTIRASTPMFLMSHKIKSLGVKMVISGEGSDELFGGYLYFHKAPNKEELHRETCRK

SEQ ID NO: 10995 - protein, 175 aa, Triticum aestivum
MAPAVMASSATTVAPFQGLKSTAGLPVSCRSGSTGLSSVSNGGRIRCMQVWPIEGIKKFETLSYLPPLSTEALLKQVDYLIRSKWVPCLEFSKVGFVFREHNSSPGYYDGRYWTMWKLPMFGCTDATQVLNEVEEVKKEYPDAYVRVIGFDNMRQVQCVSFIAFRPPGCEESGKA

SEQ ID NO: 10996 - protein, 349 aa, Zea mays
MGERGAEEDGSGGSSLSLMCLEDGADLDAGGSAESADDGEPAVVAHSDAGEDQEEEYMDYLVSKESSFCCSPSSSPVSSDAGAETRPSSTASSSDEWFRCARHATVAWVLETRAYFGFSHRAAYLAVSYMDRFCLRRCMDVSVMPWAARLLAVACLSLAAKMEEYRAPALSEFRAHDDYDFSSVCIRRVELLVLSTLGWRMGGVTPLDYLPCLSFRLRRGGGGGLIAAKAAALIFSAAEAASVLDYRPSTVAVAAVLAAAHGAMTKEALECNMSSLTPSCLLDKDDVHACYSTMLSESSSPTPSKLADKRPPPSSSGSTMYESVDAASSFAATAGRSKRARLEMPAIGP

SEQ ID NO: 10997 - protein, 277 aa, Bacillus sp. KSM-K16
MIPTVTLKDGLQLPAIGFGTYALNGAAGVNAMVSAIDIGYRLLDSAFNYENEGAVGEAIRRSSVPRAQLRVTSKLPGRRQAYAQAIVTIQESLLRARLDYYDLYLIHWPNPKTDLYVEAWQALIDAQKWGLIRSIGVCNFLPEHLERLERETGVMPSINQIELHPYFSQESQRVWDNNHHIVTESWSPLGRASSVLQDKVIKQIAATHRKSVSQIILRWHVQLGAIPLPKSASPERQLENIAIFDFSLSTEEMEQINKLTKADGRIQNQDPAEYEEF

SEQ ID NO: 10998 - protein, 347 aa, Oryza sativa (japonica cultivar-group)
MAARWRGIPWCRSLPNGPSSPVDMVVDYYLYDYEYAEPPRVTSLQNAVPQRTFSDFGDDVYFVADKRGYESVVHYLAGQYLNTDDSGNVADPRLQLNKVVREISYSSSGVTVKTEDGSVYQADYRHGLCQLGSPAERSYTVQATAASSDRCVLHVFDQKWKILAIYEFDMAVYTKIFVKFPKRFWPEGEGREFFLYASTRRGYYGIWQEFEKQYPDSNVLLVTVTDKESRRIEQQSDNQTKAEIMEVLRNMFPDQDVPDATDILVPRWWSNRFYKGTFSNWPIGVNRYEYDQLRAPIERVYFTGEHTSEYYNGYVHGGYLAGIDSAEILIDCAQNQMCKYHVQGKYD

SEQ ID NO: 10999 - protein, 467 aa, Agrobacterium tumefaciens str. C58
MTIDIKNIAEMDRNAVLHPFTQLKDFASGKLGEPTIVETGKGIRIQDAHGKQLIDGFAGLYCVNVGYGRTEVAEAISRQAYRLAYYHSYAAHTTDELAILSDRLVRMAPGKMSKVFYGMSGSDANETQAKLVWYYNNLRGKPQKKKIISRERGYHGCSVVAGSMTGMSFYHDHMDLPRVGILHTGVPHHYWGAEAGETELEFSKRRAAELEALILREGPDTIGAFIAEPVLGTGGITPPPEGYWPAIQEVLKKYDVLLIADEVITGFGRTGSMFGSQHYGIEPDLITVAKGLTSAYFPLSGAIVGEKVYTVMEDGADRVGAFSHGYTYSGHPIGAAAANAVLDIVEKEDLPGNAQAVGSYFQEQLKAKFAQLPIVGEVRGVGLMGAIEFVADREKKTRFAPHLTVGARVSKAARNGGLIARAMPHGDILGFAPPLVTTKAEVDEIIAIAEAAVRTVMDDLVQAGEKI

SEQ ID NO: 11000 - protein, 397 aa, Lycopersicon esculentum
MSSSLHSPLYSSLSSSSALQDRKLRNAVNFAKPNLIFKPRRSFPLIRASAGFSSSLDTGLSTELDAVANHSEIVPDTVIFDDFEKFPPTAGTASSSLLLGICGLPDTKFKSAVDRALSDSECYGLESSDLQMSCFFNKALAHVGGDLAKLVPGRVSTEVDARLAYDTHGIVRKVHDLLKAYTEIEVPPERLLFKIPATWQGIEASRVLEAEGIQTHLTFVYSFCQAAAAAQAGASVIQIFVGRLRDWSRNHTGDSEVESALRRGEDPGLALVTKTYNYIHKYGHKTKLMAAAVRNKPDVFNLLGGGYIITPLKVLQSLKESVTLLDEKYSFTRRLSPQSAAAFNFTQDELQKWDQYSFSSAMGPASVELLTIGLDGYINQAKRVEELFGKIWPPPNV

SEQ ID NO: 11001 - protein, 492 aa, Agrobacterium tumefaciens str. C58
MKGIASAALKNLHRRDLIEDRAFVNGAWVERDQMFAIVDPAGGDHLADVASCTLNDVDFAIDAASKAFAGWRDMLPVDRGDILRNWSARMRENAHDLATIISAEQGKPLAESRGEIAYAANFLDWFASEGERSYGETIPTHLKGSNLSVRMQPIGVTVAITPWNFPSAMIARKAGAALAAGCTMIVKPAPETPLSALALARLAEESGVPPGVLQVLPGEAAPLARRLLENTEVRAFSFTGSTEVGRILLTQSAATVKKASLELGGHAPFIVFADADLTEAVKGCLGAKFATSGQDCLAANRIYVQRSLYPRFVERFAEATSRLTVGHGLETGVDIGPMTRPSVAEKCRQQVAQALSAGARLVCGGQDSPLGGNFVTPTVLADVTDDMLIAREETFGPVAAILPFDDEAEVIRRANATEMGLAAYLYTNDLGRAMRLTDQLEYGMVAVNTPKFTGAPIPFGGWKQSGLGREGSRHGLMEYLEPKYVCFGNLAA

SEQ ID NO: 11002 - protein, 422 aa, Wolinella succinogenes
MGTVTFTNNETGEKFEFEILNPTRGPQLVDFSKFYETTGMFTFDPGYGSTANCKSEISFVDGKKGELVYYGHPIEELVEKYKFVDVIKLLIGNGYIFPTKEESDQFERELVRRSYIHEGLRKIIDAFPDGAHPMANLSSSVSALSTFYYDHIDMEYEAEYQTMARRIIAKTPTLAAFAYRSSVGSPFVYPDADRGYVENFLYMLRAYPHGKLKEEISPIEVSALDTIFMLHADHGQNASTATVRNVASTGVHPYAALSAGLSALWGKAHGGANESVMDQLEMIGDVKNVDRYIAKAKDKNDSFRLMGFGHRVYKSYDPRARILRKLKDDLDQKGVKMNQRLVEIAEKIEEVATQDEYFLSRSLYPNVDFYSGIILTALKIPKSMFTPIFAIGRMPGWCGQVLELLQEPNVKITRPRQMYVGK

SEQ ID NO: 11003 - protein, 121 aa, Solanum melongena
SSKDSKQLDAEVHRKYIYGGHVAAYMNILMEDEPEKYQSHFSSYIKADLAPDNIEEMYKKVHAAIRPDPSPKKSQKQPPKTHKRYNLKKLTYEERKAKLIERLNALNAAGGNDDDDEEDDE

SEQ ID NO: 11004 - protein, 168 aa, Zea mays
SILQIKVEDMDAYAPKDLLVVTTGSQGEPRAALNLASYGGSHTLKLSKEDVLLYSAKVIPGNETRVMKMMNRLTDLGPKIIMGKDSGLHTSGHAYREELEEVLRIVKPQHFLPVHGELLFLKEHESLGRSTGIRHTTVIKNGEMLGVSHLRNRRVLSNGFVSLGKEDL

SEQ ID NO: 11005 - protein, 430 aa, Wolinella succinogenes
MANFEGYNPRFLPLPTEGEAITLTPEGILQVPDHPIIPYIEGDGIGMDITPAMKSVVDAAVNKAYGGKRKIAWYEVYTGEKCYEKFKNEKSLSPMDQWLLPDTIDAINYFKVSIKGPLTTPVGEGFRSLNVALRQMMDLYVCLRPVRWYGSPSPVKEPHKVDMVIYRENSEDIYAGIEFAAESKEANKVIQFLQNEMEVKKIRFPKTSAIGIKPVSKEGSERLIRKAIQYAIDNDRASLTFVHKGNIMKFTEGGFMKWGYELLKREFGATEIDGGPWCSMKNPKTGKEIIIKDVIADAFLQQILLRPAEYDVIATMNLNGDYISDALAAMVGGIGIAPGANLNDSVAMFEATHGTAPKYAGLDKVNPGSLILSAEMMLRHMGWIEAADLVVSSMKKAIESKNVTYDFARLMEGAKEVKCSEFAQVMIERM

SEQ ID NO: 11006 - protein, 197 aa, Medicago sativa
MSGSRFIKCVTVGDGAVGKTCLLISYTSNTFPTDYVPTVFDNFSANVVVDGSTINLGLWDTAGQEDYNRLRPLSYRGADVFLLAFSLISKASYENIAKKWIPELRHYAPGVPIILVGTKLDLRDDSQFFQDHPGAAPITTAQGEELRKLIGAPVYIECSSKTQKNVKAVFDSAIKVVLQPPKQKKTKRKGQKACSIM

SEQ ID NO: 11007 - protein, 179 aa, Wolinella succinogenes
MALEGESPQGWVIWITGLAGSGKTTLGRAVYEALRREISHVVYLDGDGFREIFGHSGYDRESRIEISKKRSALCAFLASQGIHVVATAISMFDEIYRLNRQNIPRYLEVYVKCEMEELIRRDQKNLYTKALKGEIQEVVGVDIAFDEPSAHVVIDNTLWGSIDEKRDRILSEIYIQGIR

SEQ ID NO: 11008 - protein, 312 aa, Zea mays
  misc_feature (152)..(152): Xaa can be any naturally occurring amino acid
  misc_feature (155)..(155): Xaa can be any naturally occurring amino acid
IFEPKAGVQRTCVHRAERSAGPVRRPPADATTNGCPPSGPGGAAGGAEAGAFGGAILLLWAWRVGSRRRGLRRPALRQRRGPLPSLPPPTPPRRGPISPALLLHNSAVSLLHSSLTSVSVIFVLAKQWRNKGLEYVFEQEELFGCIWLGTFXSSXHACGYFAYDQLDMLRYRLYSGWLPGILMHHLILLICFTLALYRNVTINYLNLSLVCELHSIFLHVRKVRRMVGFRDFDRTVVKLEWVLNWTTFVTARVICHILITYKLISDAHKFGKGIELPLALLGMAGMNLLNIFLGLDLLKAFTRERNKQNHQD

SEQ ID NO: 11009 - protein, 368 aa, Sordaria macrospora
MATHNIVVFGGDHCGPEVVVEAIKVLKSIETNSPSAGKFNLQNHLLGGASIDKHHDPLTDEALNAAKAADAVLLGAIGGPEWGTSSTVRPEQGLLKLRKELGTYGNLRPCNFASESLVDSSPLKAEVCRGTDFIVVRELTGGIYFGDRTEDDGSGYACDTEPYSRAEIERIARLAGFLALAKNPPAKVWSLDKANVLATSRLWRKTVTDVISKEFPQLQLEHQLIDSAAMLLVKNPRALNGVVITSNLFGDIISDEASVIPGSIGLLPSASLGGIPDGKGKCNGIYEPIHGSAPDISGKGIVNPVGTILSVAMMLRYSLNLPKEADAVEAAVKAAIDNGTKTKDLGGSATTSDMGNAVVAELEKILKA

SEQ ID NO: 11010 - protein, 115 aa, Leonurus artemisia
MAALIKLMCTMLIVAAVVAPLAEAAIGCNTVASKMAPCLPYVTGKGPLGGCCGGVKGLIDAARTTPDRQAVCNCLKTLAKSYSGINLGNAAGLPGKCGVSIPYQISPNTDCSKVH

SEQ ID NO: 11011 - protein, 251 aa, Triticum aestivum
MMGYQKGVDIEAGTSGGTGTAAPTRGLYPGMTESPELRWALIRKIYVILSLQLLLTAVVAAVVVKVRAIPHFFVSSSAGLGLYIFLIIFPFIVLCPLYFYRQKHPVNLLLLGVFTVAISFAVGMTCAFTSGKVILEAAILTTVVVFSLTAYTFWAAKRGQDFSFLGPFLFASLIMLLVFGFIQILFPMGKLSHMIYGALAALIFSGYIVYDTDNIIKRYTYDEYVWAAVSLYLDVINLFLALLTLFRAGDS

SEQ ID NO: 11012 - protein, 279 aa, Bacillus cereus ATCC 10987
MKNLQSTTTLHNGVEMPWFGLGVFKVEDGPELVEAVKSAIKAGYRSIDTAAIYGNEKAVGEGIRAGIKEAGISREDLFITSKVWNSDQGYETTLAAYEESLKKLELDYLDLYLVHWPVEGKYKDTWRALETLYKEERVRAIGVSNFQIHHLQDVMKDAEIKPMINQVEYHPRLTQKELQAFCKEQGIQMEAWSPLMQGQLLDNETLQAIAEKHGKTTAQVILRWDLQNGVITIPKSTKEYRIIANADVFNFELTKEDMEKIDALNQNHRVGPDPDNFDF

SEQ ID NO: 11013 - protein, 311 aa, Picrophilus torridus DSM 9790
MDRNELLKEPVKDISIKSETTISELIGMFGRSGGFTAKKIYEGYEIIKEMFNDDETTFLSFPADIISTGTRGIINELVKRKLVDVIITTNGTLDHDIARTYRDYYAGTFNFSDAMLRDLGINRLGNVFVPDESYGSIIEEKVMPILDELYKEKKEWSGYELIWELGKRINNESSIIYNAYKNRIPVFIPGMTDGSVGSQLWSFYEMNRDFRINLLEDEHKLSDIIFDAKKTGAIMIGGGISKHHTIWWNQFRDGLNQAVYITTAQEYDGSLSGAKLEEAISWKKVREDARFVNIYGDATVILPLIVAPFLK

SEQ ID NO: 11014 - protein, 131 aa, Zea mays
  misc_feature (82)..(82): Xaa can be any naturally occurring amino acid
  misc_feature (104)..(104): Xaa can be any naturally occurring amino acid
ALVFSCRSRNELRGCITRLTDPWSPSYTLCRYQGVVPIKVNQNKHFLHDKVRGVQQWNYGLEAGSKPELLIAMSCLPSTEAXPKPNLICNGYKDARLHGDCALXRAMGLNLIIVLEMEEELAICLDQYRKL

SEQ ID NO: 11015 - protein, 341 aa, Streptomyces avermitilis MA-4680
MRIGVLTSGGDCPGLNAVIRSVVHRAVVDHGDEVIGFRDGWKGLLECDYLKLDLDAVSGILARGGTILGSSRVQPAHLRDGVERARGHVAELGLDAIIPIGGEGTLKAARLLSDAGLPIVGVPKTIDNDIAVTDVTFGFDTAVGVATEALDRLKTTAESHQRVLIVEVMGRHTGWIALHSGMAAGAHAIVVPERPFDIEELAAKVGERFEAGKRFAIVVAAEGAKPRAGSMDFDEGKKDVYGHERFAGIARQLSLELEERLGKEARPVILGHVQRGGTPTAYDRVLATRFGWHAVEAVHRGEFGKMTALRGTDIVMVSLAEAVETLKTVPEERYAEAECVL

SEQ ID NO: 11016 - protein, 472 aa, Zea mays
  misc_feature (7)..(7): Xaa can be any naturally occurring amino acid
  misc_feature (13)..(13): Xaa can be any naturally occurring amino acid
GVVYIAXWSRDTXVVLVRDPGGASASSESLGELLIRKADEGVAVLMLVWDDRTSVGLGPIKRDGLMATHDQDTASFFRDTRVQCVLCPRNPDKDRSYVQDIETATMFTHHQKTVIVDGGGAPAPETPPGLVSFLGGIDLCDGRYDTQDHPLFRTLGTTHSKDFHQPNFPGASISKGGPREPWHDIHCRVEGPAAWDVLENFEQRWKKQGKGDNLLVALNKAWAEREAAPRGDAESWNVQVFRSIDGGAAAGFPEGSANAPREAAALGLVSGKDHVIERSIQDAYIHAIRRARDFIYIENQYFLGSSYAWRQNDGVTVEDINALHLIPKELSLKIVSKIEAGERFVVYVVVPLWPEGVPESGSVQAILDWQRRTMEMMYKDVTLAIRARGLRADPRDYLTFFCLGNREAPSPGEYVPPEHPDPNTDYERAQQARRFMIYVHAKTMIVDDEYIIVGSANINQRSMDGGRRLVDI

SEQ ID NO: 11017 - protein, 90 aa, Glycine max
ITELAGCDRLTISPALLEELTKSTDKLAKKLDPETAAKAYSGEKLSYDEKDFRLSMNEDAMATDLLAEGIRGFSADIVKLEQILKAKLSA

SEQ ID NO: 11018 - protein, 482 aa, Escherichia coli CFT073
MKLNDSNLFRQQALINGEWLDANNGEVIDVTNPANGDKLGSVPKMGADETRAAIDAANRALPVWRALTAKERANILRNWFNLMMEHQDDLARLMTLEQGKPLAEAKGEISYAASFIEWFAEEGKRIYGDTIPGHQADKRLIVIKQPIGVTAAITPWNFPAAMITRKAGPALAAGCTMVLKPASQTPFSALALAELAIRAGVPAGVFNVVTGSAGAVGNELTSNPLVRKLSFTGSTEIGRQLMEQCAKDIKKVSLELGGNAPFIVFDDADLDKAVEGALASKFRNAGQTCVCANRLYVQNGVYDRFAEKLQQAVSKLHIGNGLEKGVTIGPLIDEKAVAKVEEHIADALEKGARVVCGGKAHERGGNFFQPTILVDVPANAKVSKEETFGPLAPLFRFKDEADVIAQANDTEFGLAAYFYARDLSRVFRVGEALEYGIIGINTGIISNEVAPFGGIKASGLGREGSKYGIEDYLEIKYMCIGL

SEQ ID NO: 11019 - protein, 505 aa, Bradyrhizobium japonicum USDA 110
MNKVEFLSVTKVPFAERYDNFIGGKFVAPISGKYFDNASPVNGQIVCKIARSDAQDVEAALDAAHAAKAGWGSTSVAERAAILNKIADRMEENLERLAIAETWDNGKPIRETRAADIPLAIDHFRYFAGVVRAQEGSIGEIDHDTIAYHFHEPLGVVGQIIPWNFPLLMACWKLAPALAAGNCVVLKPAEQTPASIMVWAEIIGDLLPPGVLNIVNGFGLEAGKPLASSPRIAKIAFTGETSTGRLIMQYASQNLIPVTLELGGKSPNIFFKDVTAEDDDFFDKAIEGFVMFALNQGEVCTCPSRALVHADIYDRFMERALKRVAAIKQGDPRAADTMIGAQASGEQLAKILSYIDIGKQEGAKVLAGGGRAELGGDLSGGFYVQPTVFEGHNKMRIFQEEIFGPVVSVTTFKTDDEALAIANDTLYGLGAGVWSRDANRCYRFGRAIQAGRVWTNCYHAYPAHAAFGGYKQSGVGRETHKMMLDHYQQTKNLLVSYSPKKLGFF

SEQ ID NO: 11020 - protein, 367 aa, Methanopyrus kandleri AV19
MPPKWYRHVMRVLSESHVVLEVRDVRYPEETRWEKLPRLEDVFDFTRVVVLNKADLVPRAETERVKEEVELEEDVPAVYVSARERMGFRHLRRTIYEVAPEDVETVRVGVVGFQNVGKSTIINALTRRSAAETSRRAGYTRGKQWVRGGRKLLVIDSPGVIPTDEAAAEAVALDPDVLEDPVEPALGVIERVVREYPGALSDKFGIDESMDPERILRDISERLGKDLRTTAKLLLREWVDGSLVEIYRTTRADLAETSELEVGGTAQRLVEETLREIEEVVPEGIPPSAATVRGILTRLAHGENVDGVGFGTIRLGEYGVGVSVGDRYYDRMVRRLRRELGGEVISEERFRVGANGRKAVALVTKGR

SEQ ID NO: 11021 - protein, 139 aa, Triticum aestivum
  misc_feature (34)..(35): Xaa can be any naturally occurring amino acid
  misc_feature (40)..(42): Xaa can be any naturally occurring amino acid
  misc_feature (44)..(44): Xaa can be any naturally occurring amino acid
  misc_feature (48)..(48): Xaa can be any naturally occurring amino acid
  misc_feature (52)..(52): Xaa can be any naturally occurring amino acid
  misc_feature (55)..(55): Xaa can be any naturally occurring amino acid
  misc_feature (59)..(59): Xaa can be any naturally occurring amino acid
  misc_feature (67)..(67): Xaa can be any naturally occurring amino acid
  misc_feature (71)..(71): Xaa can be any naturally occurring amino acid
  misc_feature (84)..(84): Xaa can be any naturally occurring amino acid
  misc_feature (91)..(91): Xaa can be any naturally occurring amino acid
  misc_feature (94)..(94): Xaa can be any naturally occurring amino acid
  misc_feature (97)..(98): Xaa can be any naturally occurring amino acid
  misc_feature (102)..(102): Xaa can be any naturally occurring amino acid
  misc_feature (104)..(106): Xaa can be any naturally occurring amino acid
  misc_feature (109)..(109): Xaa can be any naturally occurring amino acid
  misc_feature (113)..(113): Xaa can be any naturally occurring amino acid
  misc_feature (116)..(116): Xaa can be any naturally occurring amino acid
  misc_feature (126)..(126): Xaa can be any naturally occurring amino acid
ADPSIPSLPLSLDHPCPRTEDRRRPTPSTSETKXXSGASXXXPXQGGXIRKXGHXVIMXRPCKVVEXSTSXTAKHGHAKCHFVXAIDIFNXKNXEDXXPSSXNXXXPHXDRQXYQXLIDISDDGYXHLLTESGNTKDDL

SEQ ID NO: 11022 - protein, 491 aa, Burkholderia cepacia R1808
MADWQDKAASLRIEGRAFIDGASRDAHGGKTFDCVSPIDGRVLAKVADCGEADVNAAVAAARRAFDAGVWAGLNPRARKAVLLRWAALMRTHLDELALLETLDAGKPIGDTTTVDVPGAAYCVEWFAEAIDKVGGEVAPADHHLVGLVTREPVGVVAAVVPWNFPILMAAWKFGPALAAGNSVVLKPSEKSPLTAIRVAQLAYEAGIPAGVFNVVPGAGEPGKLLALHRDVDCIAFTGSTAVGKLIMQYAAQSNLKRAWLELGGKSPNIVLPDCPDLERAAQAAAGAIFYNMGEMCTAGSRLLVHRDIKDAFIAKLVAAARAYVPGNPLDPSVSMGAIVDGIQLERVLGYIEAGRSEGTLVTGGARVRQETGGFYVEPTVFEVKPDAKIAREEIFGPVLSVIVFDDVDEAVRIANDTEYGLAAAVWTSDLTTAHDVSRRLRAGTVWVNCYDEGGDMNFPFGGYKQSGNGRDKSLHALEKYTELKSTLIRLR

SEQ ID NO: 11023 - protein, 102 aa, Triticum aestivum
RFKCFPPIRDAANKENLWEALLDGHIDMLSSDHSPSTPDLKLMEEGNFMKAWGGISSLQFVLPVTWSHGKKYGITLNQLASWWSEKPAELAGQKNKGSILPG

SEQ ID NO: 11024 - protein, 343 aa, Listeria innocua Clip11262
MKAVVKTNPGYDQMELRDVEEPQVYGDKVKIKVAFTGICGSDIHTFKGEYKNPTTPVTLGHEFSGVVVEVGPDVTSIKVGDRVTSETTFETCGECIYCKERDYNLCSNRRGIGTQANGSFAEFVLSREESCHVLDERISLEAAALTEPLACCVHSALEKTTICPDDTVLVFGPGPIGLLLAQVVKAQGATVIMAGITKDSDRLRLAKELGMDRIVDTLKEDLAEVVLGMTDGYGAERVFDCSGAVPAVNQGLPLTKKKGDFIQVGLFAEKKNAIDEESIIQREIAYIGSRSQKPSSWILALDLLANGKINTDKMITKVYGLDDWREAFEAVMAGNEIKVLVKS

SEQ ID NO: 11025 - protein, 350 aa, Listeria innocua Clip11262
MRAAVLYENNVIKAEQIDEATCGKDQVRVEVKAVGICGSDIHKMQTRWKYPLPAVMGHEFAGVVTEIGSEVTNVAIGDRVAGIPLEPCMECNYCKAGDFALCDNYRMVGSHFHGGFAENVVMKADNVISIGDLDFEEGAMIEPLAVSMHGVLGIEPRLGDTVIVFGIGTIGILVVQCLLLAGVKDIIAVDISDKKLADAREFGCKYTINPKNEDLKERVFAYTNGLGADIALECAGSKITQEQCLLVTKKKGKVGYLGIAYADVLLHEEAFENIFRRELTLKGFWNSYSAPFPGEEWRTSIEFVKQGRIKLKPLISHRYKLEETKEAFDMILSREHDYNKVMILPQKGDD

SEQ ID NO: 11026 - protein, 154 aa, Synechocystis sp. PCC 6803
MPLPTSLTTLDGTPLAPEVIADKVVLFVNVASKCGLTPQYSGLVALDKAYGEKGLVIIGVPCNQFGAQEPGSPEEIKDFTKTKYDVDFTLLEKQDVNGPNRSPLYQFLVGDGEDISWNFGKFLIGRDGQVVARFDPQTKPDDTNLKAAIEKALG

SEQ ID NO: 11027 - protein, 477 aa, Burkholderia cepacia R1808
MTYRNESAWVQPAAPATAPRTTQARTTAEYRALDAAHHIHPFSDMGALNRAGSRVIVKADGVYLWDSDGNKIIDGMAGLWCVNVGYGRKELADAAYRQLQELPFYNTFFKTTHPPVIELSAMLAEVTPAGFNHFFYCNSGSEGNDTVLRLVYQYWRVQGKPQKKYVISRHNGYHGSTIAGATLGGMDYMHEQMPSKVEHIVHIDQPYFFGEAQAGETPEAFGLARAQQLEAKILELGAENVAAFIGEPFQGAGGVIFPPSTYWPEIQRICRKYDILLVADEVIGGFGRTGEWFAHQHFGFEPDLITMAKGLTSGYVPMGAVGIHERVARPIIDNGEFNHGLTYSGHPVAAAVAVANLKLLRDEGIVERVKRDTGPYFQALMRDTFAQHPIVGEVHGQGMVASLQLAQAPAERRRFANGGEVGTICRDFCFNGNLVMRATGDRMLLSPPLVISRQEIDELVSKAKKAVDATAQQLGLS

SEQ ID NO: 11028 - protein, 334 aa, Glycine max
MGEIALPNGISNGNINGVNGQSHSLNGYRKSCWYEEEIEEDLRWCFALNSILHTGASQYQDIALLDTKPFGKALVIDGKLQSAETDEFIYHECLVHPALLHNPSPKNVFIMGGGEGSTARELLRHKTIDKVVMCDIDEEVVNFCKSYFVVNKEAFRDTRLEVVINDARVELEARDESYDVIIGDLADPIDGGPCYKLYTKSFYELIVKPRLKQGGIFVTQAGPAGIFSHTEVFSCIYNTLRQVFKYVVPYSAHIPSYADIWGWVMASDSPLDLSAEELDLRMRHRIKGENGYLDGKTFTSASTLSKTVRNSLDNETHVYTEESARFIYGHGKHA

SEQ ID NO: 11029 - protein, 348 aa, Mesorhizobium loti MAFF303099
MRALVLEKKGELSLREIALPLDVGPDDVKIAIHTVGVCGSDVHYYTHGAIGSYVVRAPMVLGHEAAGTVVETGANVETFKAGDRVCMEPGVPNLSSRATKLGIYNVDPDVSFWATPPVHGVLAPYAVHPAAFTYKLPDNVSFAEGAMVEPFAIGMQAASRARIVPGDVAVVVGCGPIGIMIALAALAGGCSKVLISDFSAPKLKIAAQYAGIVPVNIGERSLVDAVAAATDKWGADIVFEASGSPKAFADLFDVVRPGGAVVLVGLPVEPVALNVPAAISKEVRIETVFRYANIFDRALQLIASGKVDLKPLITGTYDFADSIKAFERAAQGNPEDVKLQILLTGEKG

SEQ ID NO: 11030 - protein, 280 aa, Oceanobacillus iheyensis HTE831
MVNQIPNVTLHDGLTIPKVGFGTYRLNGNDGVQAINNAIDHGYRLIDTAYNYENEGTVGEAVRRSSTPREQLLITSKLPGRYHHYDKAVTTIQESLYRANLDYYDLYLIHWPNPIQDIYVEAWQALIEAKRRGYIRSIGVCNFLPEHLERLKQETGELPTINQIELHPFFNQEDQRKWHQEHQIATESWSPLARTNDVLDHPVLQKLASNHNRTVSQIILRWHYQLDAIAIPKSATPSRQLENISIFDFELSDEEMSIINQLSKVDGRMKDQDPAVYEEF

SEQ ID NO: 11031 - protein, 413 aa, Rickettsia heilongjiangii
IAELKIRGKIFKLPILKASIGEDVIDISRVSAEADCFTYDPGFMSTASCQSTITYIDGDKGILRHRGYDIKDLAEKSDFLEVAYLLIYGELPSGEQYNNFTKQVAHHSLVNERLHYLFQTFCSSSHPMAIMLAAVGSLSAFYPDLLNFKEADYELTAIRMIAKIPTIAAMSYKYSIGQPFIYPDNSLDFTENFLHMMFATPYTKYTVNPIIKNALNKIFILHADHEQNASTSTVRIAGSSGANPFACISTGIASLWGPAHGGANEAVINMLKEIGSSEYIPKYIAKAKDKNDPFRLMGFGHRVYKNYDPRAAVLKETCKEVLKELGQLDNNPLLQIAIELEAIALKDEYFIERKLYPNVDFYSGIIYKAMGIPSQMFTVLFAIARTVGWMAQWKEMHEDPEQKISRPRQLYTG

SEQ ID NO: 11032 - protein, 424 aa, Atriplex prostrata
YLRAIAAKITERKDHFVKLETLDSGKPFDEALLDIDDVAGCFEYYADQAEALDAKQKAPIALPMDTFKSHVLRQPIGVVGLISPWNYPLLMATWKVAPALAAGCAAILKPSEMASVTCLELADVCKEVGLPPGVLNILSGYGPEAGGPLASHPDVDKVAFTGSTATGSKIMSSAAQLVKPVTLELGGKSPIILFEDVDLDQAAEWAAFGCFWTNGQICSATSRLLVHESIAAEYLDKLVKWCKNIKISDPFEDGCRLGPVVSKGQYEKVLKFISTAKSEGATILCGGSRPEHLKKGYFIEPTIISDVSTSMQIWKEEVFGPVLCVKTFSSDEEAIELANDTQYGLGAAVLSKNLERCEKVTKALEVGIVWVNCSQPCFCQAPWGGAKRSGFGRELGEWGIENYLNIKQVTSDISDEPWGWYKSP

SEQ ID NO: 11033 - protein, 399 aa, Bacillus cereus ATCC 10987
MLENQINERSLLLHKELVGKIEITSKVEVNSADDLSLTYTPGVAESCKAIAADEETVYDYTARGNMVAVISDGTAVLGLGNIGPKAAMPVMEGKSILFKKFANVDAFPLCLGTTDVDEIVTLVKNLEPTFAGINLEDIAAPRCFEIEKRLKEETNIPVFHDDQHGTAIVVLAAVINALKVVRKQMDHVKIVINGAGSAGIAIGKLLLKAGAQHITLVSLEGIVCEGETWMNEAQIEVSKKTNREHVRGTLKEAIHQADIFIGVSAPNVLTKEFVQTMNEKAIVFAMANPIPEIFPEDALEAGAAVVGTGRSDYANQVNNVLAFPGIFRGALDVRATDITEEMKLAAAYGIANIITDEERNANYVIPNPLDKRVVPSVAEAVAKAAIDSGVARITRIPSY

SEQ ID NO: 11034 - protein, 500 aa, Atriplex prostrata
MAFPIPVRQLFIDGEWREPLLKNRIPIINPSTEEIIGDIPAATAEDVEVAVVAARKAFKRNKGRDWAATSGAHRAKYLRAIAAKITERKDHFVKLETLDSGKPFDEAVLDIDDVASCFEYFAGQAEALDAKQKAPVTLPMDRFKSHVLRQPIGVVGLISPWNYPLLMATWKIAPALAAGCTAVLKPSELASVTCLEFGEVCNEVGLPPGVLNILTGLGPDAGAPIVSHPDIDKIAFTGSSATGSKIMASAAQLVKPVTLELGGKSPVIMFEDIDIETAVEWTLFGVFWTNGQICSATSRLLLHESIAAEFVDRMVKWTKNIKISDPFEEGCRLGPVISKGQYDKIMKFISTAKSEGATILCGGSRPEHLKKGYYIEPTIITDITTSMQIWKEEVFGPVICVKTFKTEDEAIELANDTEYGLAGAVFSKDLERCERVTKALEVGAVWVNCSQPCFVHAPWGGVKRSGFGRELGEWGIENYLNIKQVTSDISDEPWGWYKSP

SEQ ID NO: 11035 - protein, 624 aa, Zea mays
AHTPDAFAPRIPLAGGRLYQPGRCWEDVFDAISNARHLIYITGWSVYTEITLLRDGSRPRPGGEATLGELLKRKASEGVRVLMLVWDDRTSVESLGMKWGFMSTHDAETAEYFRGSGVHCVLCPRNPDAGSSAVMGAQIAYMITHHQKIVVVDHEMPAKRSDRRRILSFVGGLDLCDGRYDTQFHSLFRTLDTAHHKDFHQPNLAGASIDNGGPREPWHDIHSKIEGPAAWDVLYNFEQRWRKQGGGIDLLVNLKAMADLIIPPSPVMFPEDQDSWNVQLFRSIDGGACFGFPSTPEAAAQSGLVSGKNNVLDRSIHDAYIHAIRRAKHFIYIENQYFLGSSFAWKADGIKPEEIEALHLVPRELSLKIVSKIEAGEHFAVYVVLPMWPEGPPASGSIQGILDWQRRTMEMMYNDISVALDAKRIDRDPRDYLTFFCLGNREVKMDGEYEPSGRPLDGTDYARAQNARRFMIYVHSKMMIVDDEYIIVGSANINQRSMDGGRDSEIAMGAYQPCHLNTKGQVARGQVHGFRMSLWYEHLGMLHDDFLNPGSLECVRRVNQMADRYWDLYAGDSLDADLLGHLLRYPVTVTKEGTVTELPGAKFFPDTQALVLGALSKLPPILTT

SEQ ID NO: 11036 - protein, 479 aa, Agrobacterium tumefaciens str. C58
MSLKTAPVIVWFRKDLRLSDNLALLAAVEHGGPVIPVYIREKSAGPLGGAQEWWLHHSLAALSSSLEKAGGRLVLASGDAERILRDLISETGADTVVWNRRYDPTGMATDKALKQKLRDDGLTVRSFSGQLLHEPSRLQTKSGGPYRVYTPFWRALEGSDEPHAPADPPKSLTAPKVWPKSEKLSNWKLLPTKPDWAKDFSDIWTPGETGALDKLDDFIDGALKGYEEGRDFPAKPATSLLSPHLAAGEISPAAVWHATKGLSRHIASNDISRFRKEIVWREFCYHLLFHFPELGEKNWNDSFDAFSWRDDEKSFKAWTRGMTGYPIVDAGMRQLWQHGTMHNRVRMIVASFLIKHLLIDWRKGEKWFRDTLVDADPASNAANWQWVAGSGADASPFFRIFNPILQGEKFDGDGDYVRRFVPELEKLERKYIHKPFEAPKDALKKAGVELGKTYPLPIVDHGKARERALAAYAAVKKTT

SEQ ID NO: 11037 - protein, 365 aa, Triticum aestivum
  misc_feature (96)..(96): Xaa can be any naturally occurring amino acid
  misc_feature (113)..(113): Xaa can be any naturally occurring amino acid
  misc_feature (151)..(151): Xaa can be any naturally occurring amino acid
HVYRPLGLGFDLSTTPPSSFPFPVALPPPPHILDSPFSWRPRRRRRRGGRSCRRPGRGGGGGRGRGGGGRRGRGQEPRAQGGGAGEGITDRRIRVXPTDLYHLFHLGHARSLXEQAKKSLTNSYLVVGCYNDELTQQNKGRAIITEDERYXSLQAICKWVDEVIPDAPWVVTEEFLNKHNIDFVAHDSLPYHDASGASNDVYEFVKKLGKFKETKRTEGISTSDIIMRIVKDYNEYVMRNLARGYSRNDLGVSYVKEKRLRVNMGLKTLRDKVKQHQEKVGEKWSTVAKLQEEWVENADRWVVGFLEKFEEGCHSMGTAIKERIQERLKEAQSRDFSLLQYDSDDFDDFEEEDDEVAKDAKYVKE

SEQ ID NO: 11038 - protein, 166 aa, Triticum aestivum
  misc_feature (28)..(28): Xaa can be any naturally occurring amino acid
  misc_feature (98)..(98): Xaa can be any naturally occurring amino acid
ATSVAPFQGLKSTAALPVSRRSNGASLXSVSNGGRIRCMQVWPIEGIKKFETLSYLPPLSTEPLLKQVDYLIRSKWVPCLEFSKVGFIFREHNASPGXYDGRYWTMWKLPMFGCTDATQVINEVEEVKKEYPDAYVRIIGFDNMRQVQCVSFIAFKPPGCEESGKA

SEQ ID NO: 11039 - protein, 441 aa, Arabidopsis thaliana [sequence omitted]

SEQ ID NO: 11040 - protein, 252 aa, Triticum aestivum
MMGYQKGVDIEAGTSGGGTGTTAPTRGLYPGMTESPELRWALIRKIYVILSLQLLLTAVVAAVVVKVRAIPHFFVSSSAGLGLYIFLIIFPFIVLCPLYFYRQKHPVNLLLLGVFTVAISFAVGMTCAFTSGKVILEAAILTTVVVFSLTAYTFWAAKRGQDFSFLGPFLFASLIMLLVFGFIQILFPMGKLSHMIYGALAALIFSGYIVYDTDNIIKRYTYDEYVWAAVSLYLDVINLFLALLTLFRAGDS

SEQ ID NO: 11041 - protein, 494 aa, Mycobacterium bovis AF2122/97
MLEACQAIGVTAALGEPGEHSLPASTPITGDVLFSIAPTTPEQADHAIAAAAATFTAWRSTPAPVRGALVARLGELLTAHQQDLATLVTVEVGKITAEARGEVQEMIDVCQFSVGLSRQLYGRTIASERAGHRLLETWHPLGVVGVITAFNFPVAVWAWNTAVALVCGDTVVWKPSELTPLTALACQALLSRAAADVGAPAAVGGLLLGGAERGAQLVDDPRVALLSATGSVRMGQQVGPRVARRFGRVLLELGGNNAAIVAPSADLELAVRCIVFAAAGTAGQRCTSLRRLIVHRSVADDVVARVVGAYRQLAIGDPSAPDTLVGPLIHEAAYRDMVAALERARTDGGEVIGGDRREVGSPGAYYVAPAVVRMPSQTAIVATETFAPILYVLTYDDLDEAIALNNAVPQGLSSSIFTTDLREAEHFLDQSDCGIANVNIGTSGAEIGGAFGGEKQTGGGRESGSDAWKAYMRRATNTVNYSSELPLAQGVKFG

SEQ ID NO: 11042 - protein, 133 aa, Glycine max
  misc_feature (44)..(44): Xaa can be any naturally occurring amino acid
  misc_feature (123)..(123): Xaa can be any naturally occurring amino acid
MGRLNQMPSTIVKEKPRIQAKVTEEQAWRNYERIRLTKRPYTAXRDEVPLRGNLKQTYATNETAKKLWRLLKNHPANGTTLRTLGALEPAQVTQRAKHWDTNYASGWQRSATHTTSNEPGPDXLAEHPNDTGP

SEQ ID NO: 11043 - protein, 114 aa, Nicotiana tabacum
MEMVSKIACFVVLCMVVVAPHAEALTCGQVQSSLAPCVPYLLGRGPLGGCCGGVKRLLGAARTPADRKTACNCLKSAANTFKGIDMGNAARLPGTCGVNIPYKISPSTDCSKVQ

SEQ ID NO: 11044 - protein, 308 aa, Zea mays
MDGGRPEMRRTMTLSEQLASTPDPAIRDFLKIPQDADVGGILHDEDSPSAVDAQGPRAGRTSGWKPLRDRLRLRRAAGAWQTPPNKPGAAAAHAPTNSGNLSNRYNYNPGEAAAAFSRTFSRAPSLRAPSLRATPTFSRVASTRLGPASSRSSSRRPATYDFRDVDERRHDADADDGGEEEDDEGEGDDDDDEGDEEDEKEEAPAAQMSLMALLEQTDSQWDDDEDEEESGGGGGARKKGEGDDDEDDGEGREEEMVHVCCVCMVRHKGAAFIPCGHTFCRLCSRELWVSRGNCPLCNGFIQEILDIF

SEQ ID NO: 11045 - protein, 262 aa, Triticum aestivum
RSARRSPRGSRRWRWSRPPRPRRPRRRWPPAGGGVEDKYGEDRATEELPVTPWAFSVASGYTLLRDPHHNKGLAFTERERDAHYLRGLLPPGVVSQDLQVKKIMHNLRQYKVPLQRYVAMMDLQERNERLFYKLLIDNVEELLPVVYTPTVGEACQKYGSIFRRPQGLYVSLRDKGKVIDVLRNWPERNIQVIVVTDGERILGLGDLGFRPTACLPITIDVGTNNEQLLNDEFYIGLRQRLATGEEYHELTEEFMVAVKQIY

SEQ ID NO: 11046 - protein, 338 aa, Heterocapsa triquetra
PAVSPPTPARTSAMGNACSEGCFAGFASPDPRVKELKALEGDLKNLINTLNCNPILVRLAWHDSGTFDQRIQGWPQCGGANGAIRFDPEMNFGANAGLAKAKGYLDKFVEKYPSLSWADMIQMASAVSIEMAGGPKIPMKYGRVAVTSPDQCVGSASREGFEGNAGLPDPIPGGNGKFPCGATGPAAHLRNVFTKKMGFTDQEIVALSGAHTIGRAYKERSGTCPFGYMDASASKYSKSSCIVRKDGKAGIGMPGGAAWTKNWLTFDNSYFTKFKEAMEDDHLLWYPTDECLHQDPAFRPIFMKYAESQAAFFEDYAKAHKKLSELGAKFDPPNGITI

SEQ ID NO: 11047 - protein, 198 aa, Zea mays
  misc_feature (171)..(171): Xaa can be any naturally occurring amino acid
MATSFQGTTTKCTACDKTVYLVDKLTADNRVYHKACFRCHHCKGTLKLANYNSFEGVLYCRPHFDQLFKRTGSLDKSFQGTPKVVKPERNVGNENATKVSSAFAGTREKCVGCSKTVYPIERVTVNNTMYHKSCFKCCHGGCTISPSNYIAHEGKLYCKHHHVQLIKEKGXTSASSRMTTRRHRRLGRWRTTKKKSID

SEQ ID NO: 11048 - protein, 505 aa, Oryza sativa (japonica cultivar-group)
MEREAWLLCAALAAAMVYYYYYYLACTTRRAQRRLPPGPTPLPVIGNVLSLSGDMHHELARLAREQYGPVMTLKLGLFTAVVVSSPDAAREAFTKHDRRLAARTVPDISRARGLTGRSMIWLPSSDPRWKTLRSAVATHFFSPRSLAAARGVRERKVRDIVNYFAGHAAEVIDVGEAVYGGVINIVSNAFFSADVVDVGKESAHGLRETLEDIILAIAKPNVSDLFPFLRRLDLQGWRRWAEKRYDKVFGILDDKINSRLADADADASTKKHGDFLDSLLELMSAGKIACDDVTTVMFDAFGAGTDTISNTVVWAMAELLRNPSIMAKVRAEMEDVLAGKKTIEENDTEKLPYLRAVIKEAMRLHPVAPILLPHRAAEDGVEIGGYAVPKGSTVIFNVWTIMRDPAAWERPEEFMPERFLQRAEVDFRGKDFEFIPFGAGRRLCPGLPMTERVVPFILASLLHAFEWRLPVGVAAETLDLSEKFTTVNVLVTPLKAIPILASHQI

SEQ ID NO: 11049 - protein, 199 aa, Magnaporthe grisea 70-15
MAAPGVQSLKCVVTGDGAVGKTCLLISYTTNAFPGEYIPTVFDNYSASVMVDGKPISLGLWDTAGQEDYDRLRPLSYPQTDVFLICFSIVSPPSFDNVKAKWYPEIDHHAPNVPIILVGTKLDLREDPSTLESLRSKRMEPVSYDQALICAKEIRAHKYLECSALTQRNLKSVFDEAIRAVLNPRPQPAKVKKSKCTIL

SEQ ID NO: 11050 - protein, 300 aa, Isochrysis galbana
KPHVAMDDQMYVNAVKSDIRKALVNQKGNSCPLAVRLAWHASGTYSKHDDTGGSYGATMRFPPEKEDGANAGLDIERDILQEVKRQHPDLSYADIWTLAGAHAIEIAGGPPIEHKLGRTDAQDGSACPAVGRLPDASQGAEHLREVFYRMGFNDEDIVALSGAHTLGRCHKTRSGFDGPWTHEPLKFDNSYFKNLLDLEWKPRQWDGPLQYEDPSHTLMMLPTDLALKTDPKFKEYVVAFAKSETVFRSAFKRAYEQLLCLGCPAHVVPSAAPVAMQSREEADGSLEFAQAARAAGGDPA

SEQ ID NO: 11051 - protein, 431 aa, Methanopyrus kandleri AV19
MAAESIAKAVHDVLATWGAQGPGAIFFLVWAAVLVVGMQLGFMFLEAGQVRTKNVVSVLMKNLLDLSLGGIVFIFFGFALAFPDYAQSIGKWIATMFTANPWSADPMKAADPYNLAYCFFQFAFCATAATIVSGAVAERINFKACLVMTVLITGLLYPIFVLWTWGGGWMGGDTGLFAKVFGQPYHDFAGSTVVHAIGGFLAMAAAYLLGPRIGRFKNGKPVPIPGHNIPQAFLGALFLAITWYGFNVGSSAVLYDPTNESWISSLVATLAMCGGAAAAAFTTRFDPLWAANGLIAGLVAICAGCDIMSPFGALLTGIVAGLIIKPAFRLLEKLEIDDVVAACPVHGFAGVWGAIAAGIFGAEALGGAGGVSLAAQIVGALVCIAWALGSGFATFYVIDKVIGLRATEEEEKGLDETEFGVSAYPYMETRD

SEQ ID NO: 11052 - protein, 129 aa, Brassica napus
MEHGSFTNDSFASFTLAEEDHTLANAVRFMLNQDPRVTFAGYSIPHPSLECVNVRVQTTGDPAREVLKDACQELMLMNRHVRSVFDKAVSEFKVEQARLAAEEEKNRKAEEEELKKQRDLLASMDIESD

SEQ ID NO: 11053 - protein, 389 aa, Sulfolobus acidocaldarius
MWIKGKAYYEGEIKEICINFDRSIKEIRANCKPDMTFTNEELILPASVDLHVHVRGAQLSYKETVATATSEAVYGGVGVIVDMPNTVPYINTPERIKERLREFQLYSRTDYGIYSGVSKEVEEIDKLPIAGYKIYPEDLEKEETRYVLEKSKKLKILHPEMPFVSKIERSLRRSYWMETAAINLVKGNMHITHITNFETLQLAKSMGFTTDITAHHLVVDGERDCISKVNPPIRDYVTRLKLFLKGLFEVDCIASDHAPHSKEEKRMNFDLCPPGIAGVSFSTPYIYSLMFKGLISIDRAVSLLSGNPSRILNIPTGKIKEGYRANFTVIKRENWRYTTKFSKVTETPMDGFSLDAKVTNVIVEGKLAFDGENVYPIRGVNIFDSSSRS

SEQ ID NO: 11054 - protein, 136 aa, Glycine max
  misc_feature (5)..(6): Xaa can be any naturally occurring amino acid
  misc_feature (20)..(22): Xaa can be any naturally occurring amino acid
SQILXXNSGVFKDIVLKRNXXXGPVLVYPMNRNKWYDRMSASIPDEEVFYTVGFLHSSGFDTWKAYDAQNSEILEFCRDAGIKVKQYLPNHSTQEDWTNHFGAKWMKFLERKHQFDPRMILSPGQKIFHKKLQPVF

SEQ ID NO: 11055 - protein, 483 aa, Burkholderia cepacia R18194
MDEQLITGRLLIDGELVDSETGEWAASINPATEAVIGRAPAGSRRDVARAVDAAQRAWPAWAERTGEERGELLRGFGERLLERAEELSRIEVLDSGNTYVPTLASMHETVRSLRYYAGLVHGLHGETIPATGRNLHMTVYEPYGVVGRIAAFNHPAMFSAARTASALVTGNTVVVKPPETSPLSVLVLGEVARDTLPAGVFNIVNGTGAEVGDALVRHPDVKRLALIGSVATGQAIQRSAAEVGVKHVTLELGGKNPMIVFPDADPDAAADSAVRGMNFSWQGQSCGSNSRLLVHDDIYDDVLARVVERVAAIRVGDPMSPDTGMGPINSRKSYDHVMSFLDPAQTHGARLMTGGRRPPGHAFEKGFWVEPTVYADVTPGMRLWREEVFGPILSVARWRDVDEVVAMANDTEYGLSAAIWTNDIRQALNTARRIRAGSVFVNGSNTHFLGVPWGGFKNSGVDREEGIEEMYSYVEKKVINVML

SEQ ID NO: 11056 - protein, 411 aa, Rickettsia sp. DaE100R
DSEFAELKIRGKIFKLPILKASIGEDVIDISRVSAEADCFTYDPGFMSTASCQSTITYIDGDKGILRHRGYDIKDLAEKSDFLEVAYLLIYGELPSGEQYNNFTKQVAHHSLVNERLHYLFQTFCNSSHPMAIMLAAVGSLSAFYPDLLNFKEADYELTAIRMIAKIPTIAAMSYKYSIGQPFIYPDNSLDFTENFLHMMFATPCTKYTVNPIIKNALNKIFILHADHEQNASTSTVRIAGSSGANPFACISTGIASLWGPAHGGANEAVINMLKEIGSSEYIPKYIAKAKDKNDPFRLMGFGHRVYKNYDPRAVVLKETCKEVLKELGQLDNNPLLQIAIELEAIALKDEYFIERKLYPNVDFYSGIIYKAMGIPSQMFTVLFAIARTVGWMAQWKEMHEDPEQKISRPR

SEQ ID NO: 11057 - protein, 300 aa, Triticum aestivum
  misc_feature (251)..(251): Xaa can be any naturally occurring amino acid
LQYEVLQWCICRLEAWFATDVDNISLKNWDQEHVLTGGHGLMVNGYDPVIKALSRDLDVHLNHRVTKIIQRYNKVIVCVEDGTSFVADAAIITVPLGVLKANIIKFEPELPDWKLSAISDLGVGLENKIALRFNTIFWPNVEVLGRVAQTSNACGYFLNLHKATGHPVLVCMVAGRFAYEMEKLSDEESVNFVMSQLRRMLPGATEPVQYLVSRWGTDPNSLGSYSCDLVGKPADLYERFCAPVGNLFFAXGEAACIDHSGSVHGAYSSGIGAAEDCRKAPLDQLGISDLFKSGRCDRRL

SEQ ID NO: 11058 - protein, 80 aa, Triticum aestivum; identical to SEQ ID NO: 310

SEQ ID NO: 11059 - protein, 390 aa, Zea mays
  misc_feature (20)..(20): Xaa can be any naturally occurring amino acid
  misc_feature (52)..(52): Xaa can be any naturally occurring amino acid
  misc_feature (55)..(55): Xaa can be any naturally occurring amino acid
  misc_feature (101)..(101): Xaa can be any naturally occurring amino acid
  misc_feature (114)..(114): Xaa can be any naturally occurring amino acid
  misc_feature (154)..(154): Xaa can be any naturally occurring amino acid
  misc_feature (186)..(186): Xaa can be any naturally occurring amino acid
  misc_feature (340)..(340): Xaa can be any naturally occurring amino acid
MAGGAGNGSNEAVQAKGSGXDGSHAKPVSPRWVKARSAAPESYASCHTTMIXGWXTKPRSHCGKATKVQYYNNPMWPGEAHSLKVENILYQGKSPYQEVLXVFESSTYGKVLVXLDGIVQLTDKDECAYQEMITHLPLCSIPSPKKVLVIGGGXMGGVLREISRHSSVESIDICEIDQLVIDICKXFFPHLSVGFEDPRVQLHVGDAVEFLRNAPEGTYDAIIVDSSDPIGPAQELVEKPFFETIARALRPGGVLCNQAESMWLHTHLIQDMLSICRETFKGSVRYAWASVPTYPSGVIGFLLCAKDGPPVNFLTPVNPIEEVEGATKAGREIRFYNSEXHMAAFVLPTFAKRELEAYCASTETEQAEEVAATAPQKLTAAPKRGITTAS

SEQ ID NO: 11060 - protein, 169 aa, Brassica napus
MDTVIGSIDACNPTTGDICRPPNGAVSTVQNSPPAHSTTISPCDATLGRYLARRLVEIGVTDVFSVPGDFNLTLLDHLIAEPSLKLIGCCNELNAGYAADGYARSRGVGACVVTFTVGGLSVLNAIAGAYSENLPLICIVGGPNSNDYGTSRILHHTIGLPDFTQELRC

SEQ ID NO: 11061 - protein, 113 aa, Rickettsia sp. Hf332
ANEAVINMLKEIGSSEYITKYIAKAKDKNDPFRLMGFGHRVYKNYDPRAAVLKETCKEVLKELGQLDNNPLLQIAIELEAIALKDEYFIERKLYPNVDFYSGIIYNAMGIPTQ

SEQ ID NO: 11062 - protein, 510 aa, Sinorhizobium meliloti
MNIAAKKIDVASEAAALLDKMGVAKDLYTGGDMPSFSPVTGEKIASLKTVSAAEAAGKIEKADEAFRAWRLVPAPKRGELVRLLGEELRAFKADLGRLVSIEAGKIPSEGLGEVQEMIDICDFAVGLSRQLYGLTIATERPGHRMMETWHPLGVVGIISAFNFPVAVWSWNAALALVCGDAVVWKPSEKTPLTALACQAILERAIARFGDAPEGLSQVLIGDRAIGEVLVDHPKVPLVSATGSTRMGREVGPRLAKRFARAILELGGNNAGIVCPSADLDMALRAIAFGAMGTAGQRCTTLRRLFVHESVYDQLVPRLKKAYQSVSVGNPLESAALVGPLVDKAAFDGMQKAIAEAKNHGGAVTGGERVELGHENGYYVKPALVEMPKQEGPVLEETFAPILYVMKYSDFDAVLAEHNAVAAGLSSSIFTRDMQESERFLAADGSDCGIANVNIGTSGAEIGGAFGGEKETGGGRESGSDAWKAYMRRATNTVNYSKALPLAQGVSFDIE

SEQ ID NO: 11063 - protein, 296 aa, Saccharomyces cerevisiae
MITTPLVHVASVEKGRSYEDFQKVYNAIALKLREDDEYDNYIGYGPVLVRLAWHISGTWDKHDNTGGSYGGTYRFKKEFNDPSNAGLQNGFKFLEPIHKEFPWISSGDLFSLGGVTAVQEMQGPKIPWRCGRVDTPEDTTPDNGRLPDADKDAGYVRTFFQRLNMNDREVVALMGAHALGKTHLKNSGYEGPGGAANNVFTNEFYLNLLNEDWKLEKNDANNEQWDSKSGYMMLPTDYSLIQDPKYLSIVKEYANDQDKFFKDFSKAFEKLLENGITFPKDAPSPFIFKTLEEQGL

SEQ ID NO: 11064 - protein, 201 aa, Neisseria gonorrhoeae
MMTLYSGITCPFSHRCRFVLYEKGMDFEIKDIDIYNKPEDLAVMNPYNQVPVLVERDLVLHESNIINEYIDERFPHPQLMPGDPVMRGRGRLVLYRMEKELFNHVQVLENPAAANKEQAKAREAIGNGLTMLSPSFSKSKYILGEDFSMIDVALAPLLWRLDHYDVKLGKSAAPLLKYAERIFQREAFIEALTPAEKAMRK

SEQ ID NO: 11065 - protein, 445 aa, Sinorhizobium meliloti
MNAHNKPNAPVLDSYWMPFTANRQFKAAPRLLAAAEGMHYTSVDGRTVLDGTAGLWCVNAGHGRRQIAAAVERQLSTMDFAPSFQMGHPIAFDFAERLAEIAPGPAGAKLDRVFFTGSGSESVDTALKMALAYQRSIGQGTRTRLIGRERGYHGVGFGGISVGGIVNNRRVFPQLPGSDHLRHTHDPAKNAFVKGQPEHGAELADDLERLVALHGAETIAACIVEPVAGSTGVLIPPKGYLERLRAICDKHGILLIFDEVITGFGRLGAAFATDYFGVTPDIVTTAKGLTNGAIPMGAVFASRKVHDALMHGPEGQIELFHGYTYSGHPAACAAGIATLDIYRDEGLMTRAAEIEGDWHEAMHSMKGLPHVIDIRTIGLIAGIELQSRDGAPGARAYDVFVDCFERGLLIRVTGDIIAFSPPLIAEKQHFGEIVSILADALKRVK

SEQ ID NO: 11066 - protein, 296 aa, Saccharomyces cerevisiae
MIVEKLVHVASVEKGRSYEDFQKVYNAIALKLREDDEYDNYIGYGPVLVRLAWHISGTWDKHDNTGGSYGGTYRFKKEFNDPSNAGLQNGFKFLEPIHKEFPWISSGDLFSLGGVTAVQEMQGPKIPWRCGRVDTPEDTTPDNGRLPDADKDAGYVRTFFQRLNMNDREVVALMGAHALGKTHLKNSGYEGPQGAANNVFTNEFYLNLLNEDWKLEKNDANNEQWDSKSGYMMLPTDYSLIQDPKYLSIVKEYANDQDKFFKDFSKAFEKLLENGITFPKDAPSPFIFKTLEEQGL

SEQ ID NO: 11067 - protein, 182 aa, Novosphingobium aromaticivorans DSM 12444
MPDTLAAIPLTRIDGTADSLANHAGKVLLVVNVASKCGLTPQYEGLEALYKARKDEGLEVLGFPANDFGAQEPGSHEEIAEFCKLNYGVSFPLFAKADVTGPGKQPLYAALTEAAPTKQGPAQEFRDRLKGYGMTPTEDPEVLWNFEKFVIGRDGEVAARFAPGVTPDDPALLAAIDAELAK

SEQ ID NO: 11068 - protein, 396 aa, Wolinella succinogenes
MRIREGKIVEIQKSILPEKGEEVVLAEGLSLLPAMVDLNVRVANDSLTGKNLATLAKKAAKGGVGSLALMPDCSPSLDNEAAIELLNSYKGELPASIFPIASATKKEDGKLSDLSILHKMGCRGIAIESSLDGNLSRRVCEYSLMMKAPIFCRCEDVSLRGSGVMNDGYLSSRMGLPGIPSLSETKEVAKMAETAIFMRTPVLFQALANERSLRIIERAKEENPSLFAEVSIHHLAITEDFCSGFNTGAKIRPPLKSESTRKKLLQLLKEGVVDVVTSLQSEHSLSKKDVAFEEAAFGVDNIENHFSLCYTYLIKQGRLSMSDLSRVTAKRAAEILGLESKGYVGVGADADLILVDIKSSKVVEDNFSPYYNSILYGEVERTIIAGETVYKREKKG

SEQ ID NO: 11069 - protein, 416 aa, Wolbachia endosymbiont of Drosophila melanogaster
MDKKVLLELSNGLKIELPVLSGTTGPDVLNIKDLYKMTGLFTYDPGFVSTASCSSTITFIDGDEGVLKYRGHNIADLAENNNFTAVIYLLLYGELPSSEQHKKFLLKIQESSKVSEQVTNVIKAFPKTAHPMSILVACFASLSASYHEKHGNNVNGEDLDFGISAIAQVSTIIAMIYRHINNQEFINANNELSYSENFLKMIFGDAVDNDKSALFAKALDKIFTLHADHEQNASTAAVRLVGSAGSNLFASLSAGVATLWGPAHGGANEAVINMLKEIEQSGDIDKFIEKAKDDKDPFKLMGFGHRVYKNYDPRARILEGACHEVLSKLEQNNELLKIAKKLEEIALKDEYFIVRKLYPNVDFYSGIIMNAIDIPSNMFTPIFALARTTGWVTQWYEMINDKETKICRPRQLYFGK

SEQ ID NO: 11070 - protein, 512 aa, Shewanella oneidensis MR-1
MSVNQNRSGKHALMWFRQDLRLTDNQAFTAACDWVRQHHAAKLKAIYIATPSQWHQHDIAPIQLDFIQRHVNLLAQGLVSLGVEFELIQLDSFRDIPAFLTSYCEEHSIGRVFAGQEPEINEQKRDQACVEAGIPLSLSDEHCLLPPGTVLNLSGDMYRVFTPFSRKWREVAAKQAILPLGVPAPLGSILSEPKPLFFKNIGSTYLAASKDIASSKKGFNQTAPNPLISSEQWAAGEGQAKRLLNQFIQQKVQDYKQDRDFPAIDGTSVISPYLAIGVLSPRQCVAALLQRFPEVIVDDTSPGRTWLNELIWREFYRHLLVAFPDLSKGNNFNRQADHVLWRNNQSEFLAWCEGKTGYPIVDAAMRQLNQTGWMHNRLRMVVASFLTKHLLIDWRWGERYFRQHLIDGDLAANNGGWQWSAGCGCDAQPYFRIFNPMSQSEKFDPDGRFIRKYLPELASWGVTRLHQPNQQKMPSLFEAPLFASQADYPNAIVEHNAARARALTVLGVLKKA

SEQ ID NO: 11071 - protein, 478 aa, Desulfitobacterium hafniense DCB-2
MTVIRYDNQMIVIDAGLAFPEDEMLGIDIVIPDYSYLLEHKDMVQGILVTHGHEDHIGALPYLLKDLDAPIFATRLTLGLIQSKLKEGNLDNIKATVVRPRDTVKLGVFKVEFLSVNHSIPDAVALAIHTPLGTIVHTGDFKVDHTPVMGEKIDIHKFAELGDKGVLCLMSDSTNVERPGFTMSERSVGHMFEEAFNSAKDRIIIASFATNVHRLQQVITAAHHTNRKVAVVGRSMVNTVAIASELGYLDIPEDTLVDVDEVVNLPGNQACILTTGSQGEPMSALTRMAMSDHRRIEIQPGDTVIISANPIPGNEKSVSKTIDLLFKLGANVIYESYQGMHVSGHASQEELKLMLNMIRPQYFIPVHGEYRMLIKHAKLAEQMGISRENTFVADNGTIVEFTRHGASIAGKVPAGKVLIDGLGVGDVGNIVLRDRKQLSQDGILIVVMTISRSSGAIVAGPDVVTRGFVYVRESESML

SEQ ID NO: 11072 - protein, 63 aa, Zea mays
  misc_feature (45)..(45): Xaa can be any naturally occurring amino acid
GQVGVNRLQYDQLRAPVGRVFLTGEHTSELYNGYVHGDYLSGIDXDAILINRTQKKMCKYNVH

SEQ ID NO: 11073 - protein, 116 aa, Triticum aestivum
  misc_feature (29)..(29): Xaa can be any naturally occurring amino acid
  misc_feature (33)..(33): Xaa can be any naturally occurring amino acid
  misc_feature (35)..(37): Xaa can be any naturally occurring amino acid
  misc_feature (87)..(87): Xaa can be any naturally occurring amino acid
MAPTVMASSATSVAPFQGLKSTAGLPVSXRFSXRXXXSLGSVSNGGRIRCMQVWPIEGIKKFETLSYLPPLSTEGPLLKQGSTTPDXRSQWVPCLEFSKGGVHSSREHNAFSGYYD

SEQ ID NO: 11074 - protein, 57 aa, Glycine max
MAGDSAATCIDILLAIILPPLGVFLKYGCQVEFWICLVLTLFGYIPGIIYAVYAITK

SEQ ID NO: 11075 - protein, 177 aa, Triticum aestivum
  misc_feature (101)..(101): Xaa can be any naturally occurring amino acid
  misc_feature (140)..(140): Xaa can be any naturally occurring amino acid
MAPTVMASSATSVAPFQGLKSTAGLPVSRRSNGASLGSVSNGGRIRCMQVWPIEGIKKFETLSYLPPLSTEALLKQVDYLIRSKWVPCLEFSKVGFIFREXHTHPPGYYDGRYWTMWKLPMFGCTDATQVINEVEEVKKXEYPDAYVRIIGFDNMRQVQCVSFIAFKPPGCEESGKA

SEQ ID NO: 11076 - protein, 294 aa, Saccharomyces cerevisiae
MKTLVHVASVEKGRSYEDFQKVYNAIALKLREDDEYDNYIGYGPVLVRLAWHISGTWDKHDNTGGSYGGTYRFKKEFNDPSNAGLQNGFKFLEPIHKEFPWISSGDLFSLGGVTAVQEMQGPKIPWRCGRVDTPEDTTPDNGRLPDADKDAGYVRTFFQRLNMNDREVVALMGAHALGKTHLKNSGYEGPGGAANNVFTNEFYLNLLNEDWKLEKNDANNEQWDSKSGYMMLPTDYSLIQDPKYLSIVKEYANDQDKFFKDFSKAFEKLLENGITFPKDAPSPFIFKTLEEQGL

SEQ ID NO: 11077 - protein, 359 aa, Kluyveromyces marxianus
MSKNIVVLPGDHVGTEITNEAIKVLNAISEARPSIKFNFEHHLIGGAAIDATGVPLPDEASKKADAVLLGAVGGPKWGTGSVRPEQGLLKIRKELGLYANLRPCNFASDSLLDLSPLKPEYAKGTDFVVVRELVGGIYFGERKEDEGDGVAWDSEKYSVPEVQRITRMAAFLALQHNPPLPIWSLDKANVLASSRLWRKTVEETIKNEFPQLTVQHQLIDSAAMILVKSPTKLNGIVITNNMFGDIISDEASVIPGSLGLLPSASLASLPDTNKAFGLYEPCHGSAPDLPANKVNPIATILSAAMMLKLSLDLVEEGRAVEEAVRKVLDSGIRTGDLGGSNSTTEVGDAVAKAVKEILA

SEQ ID NO: 11078 - protein, 468 aa, Zea mays
TASAVLCAPRTRLVGSSIQLPPDVDQLPILTTKVKRRVGKYELGRTIGEGTFAKVRFAKNTETGEPVAVKILDKEKVLRHKMAEQIKREISTMKLIKHPNVVRIYEVMGSKTKVYIVLEYVTGGELFDTIANQGRMREGEARSYFQQLINAVDYCHSRGVYHRDLKPENLLLDSYGNLNVSDFGLSALSQQIKDDGLLHTTCGTPNYVAPEVLEDQGYDGAMADLWSCGVILFVLLAGYLPFEDSNLMTLYKKISNAEYTFPPWTSFPAKRLLTRILDPNPMTRITIPEILEDEWFKKGYKRPEFDEKYDTPLDDVDAVFNDSEEHHVTEKKEEEPVALNAFELISRSAGLNLGNLFDSEQEFKRETRFTSKCPPKEIIRKIEEAAKPLGFGVQKKNYKLRLEKVKAGRKGNLNVATEILQVAPSLHMVQVRKAKGDTLEFQKFYKNLSKTLKDVVWKSEDLQMRAAS

SEQ ID NO: 11079 - protein, 142 aa, Saccharomyces cerevisiae
MADQVPVTTQLPPIKPEHEVPLDAGGSPVGNMGTNSNNNNELGDVFDRIKTHFPPAKVKKIMQTDEDIGKVSQATPVIAGRSLEFFIALLVKKSGEMARGQGTKRITAEILKKTILNDEKFDFLREGLCVEEGQTQPEEESA

SEQ ID NO: 11080 - protein, 373 aa, Mycobacterium avium subsp. paratuberculosis str. k10
MTKPLTDTAPVDPGAQRGSMPLTNRIQGAVTSVGVKVIPWIPTAVRRGLVRGRSVIIDGNTLDPTLQLMLSGLRAVGIDGLVVDDDPELSRAQMHESTVGFPGPQIHVDVAELALPGPAGDIPARHYRPAGGETQAPLLVFYHGGGWSIGDLDTHDSLCRLTCRDAGIHVLSIDYRLAPEHPAPAAIDDAYAAFTWAHEHAGELGAIPGRVAVGGDSAGGNLAAVVSQLARDAGGPAPVLQWLIYPRTDFTARTRSLSLFSRGFLLTKRDIDWFESQYLRNSRLDRTDPRVSPALAESLAGLAPALIAVAGFDPLRDEGQSYAEALRAAGTPVDLRYLGSLTHGFANLFQLGGDSMVATSELISALRAHLSRV

SEQ ID NO: 11081 - protein, 281 aa, Mycobacterium avium subsp. paratuberculosis str. k10
MTGESGSAAPSIALNDENTMPVLGLGVAELSDDETERAVSAALEVGCRLIDTAAAYGNEAAVGRAIAASGIPRAELFVTTKLATSDQGFKGAMDACEASLERLGLDYVDLYLIHWPAPALGTYVNSFGGMIQSRGNGHARSIGVSNFTEEYLTTVIDLTFVTPAVNQIELHPLLNQEALRKTNAEHNVVTQSYTPLALGKLNDHPTVNSVAAEYGKTASQVLLRWNLQLSNAVIFRSANAEHIASDFDVFDFELAAEHMDAINALNDGTRLRPDPDTYEGS

SEQ ID NO: 11082 - protein, 384 aa, Corynebacterium glutamicum
MTSVIKKKAKFNTLSVSGVKKLTDDSVEVSFDVPEELQDDYDYIPGQYVALRATVDGEELRRSYSICDIPNKGTIRVGIKKDLGGKFSTWANEELQLGDVIDVMNPQGAFTSKIHVTSLNDAQNLVDSELGQVENPNFVAIAAGSGITPIMSIAQAVLKSLPKATFQLVYSNKGGADVMFADKIGDLKDKYPARFAVHHVLTREQRVNPLFSGRIDDEKMELLLDQVLRPDLVDEWFLCGPFELVQMCRDSLKERDIDEKRIRFELFSTGDPKSAPGGNAGRPVIADPKGKNISIQFQLDGLSGTIESPVSAKETVLNAALRARPDVPFACAGGVCGTCRAKVVEGDYEMDENYALEPDEVAAGYVLTCQTRPTGDCITVDYDA

SEQ ID NO: 11083 - protein, 511 aa, Saccharomyces cerevisiae
MSKSKTKTDKRNQSSLSRIKLSALHYCMSDAEPSIAYLQDNSAFINNEWHNLVLEKIFPVYNPSTEEDITQVSEKSQHDSTEEDITQVSEKSQHDDDKAVVDISERGRLLNILADLIERDRDILAAIEHLDNGKPFDEAYLLDLASVLKELRYTAGWADKLHGTLRFAITIPTFQDLRFLRYTRHEPVGVCGEIIPWNIPLLMYIWKIGPALAAGNTVVLKPEELTPLTALTVATLIKEAGFPPGVVNVVSGYGPTAGAACLSHKDNDKLAFTGSTLVGKVVMKAAAKSNLKKVTLELGGKSPMIVFIDADLDWAVENAHFGVFFNQGQCCIAQSRITVHESIYDEIVERDLEKAKKQVLGNPFESDTRYGPQILKIEFDSIPRLINSAKAEGAKVLCGGGRDDSCVGYYIQPTVFADVTDEMRIAKEEIFGPVITISRFKSVDEAIKRVDNTKYGLAAYVFTKDKAIRISAALKAGTVWVNCVHVASYQIPFGGNKNSGMGRELGEYGLE

SEQ ID NO: 11084 - protein, 355 aa, Azoarcus sp. CIB
MIPEFIDTWQMTEPGKLQKTRVPMPELQPGDVVVKIAGCGVCHTDLSYFYMGVPTVQKPPLSLGHEISGTVIGGEASMIGKEVIVPAVIPCGECELCKTGRGNRCLSQKMPGNSMGIYGGYSSHIVAQSKYLCVVENRGSTPLEHLAVVADAVTTPYQAAVRADLKKDDLVIVIGAAGGVGSFMVQTAKGMGAKAVIGIDINEEKLTMMKDFGADFVINPKDKSAKDVKELFKGFCKERGLPSNYGWKIFEVTGSKPGQELALSLLSFTGKLVIVGYGTAETNYMLSKLMAFDAEIIGTWGCPPDRYAAVRDMCLDGRIKLGPFVETRPMSQIEQVFDEAHHGKLKRRVILTPDF

SEQ ID NO: 11085 - protein, 506 aa, Oryza sativa (japonica cultivar-group)
MERDAWLLCAALAAATVVYYLACTTSRRAQRRRLPPGPTPLPVIGNVLSLRGNMHHALARLARERYGPVMALKLGLVTAVVVSSPDAAREAFTKHDRRLAARAVPDTSRVRGFADRSMIWLPSSDTRWKTLRGVVATHVFSPRSIAAARGVRERKVRDIVGYFAAHVGEVVDVGEAVYSGVVNLVSNAFFSGDVVDVGEESAHGLREAVEDIILAIAKPNVSDLFPFLRPLDLQGWRRWAEKRYDTVFDILDNITNSRLADASAGNHAGDFLDSLLGLMSYGKIARDDVTTIMFDVFGAGTDTIAITVQWAMAELLRNPSIMAKARTEMEDVLAGKKTIEENDTEKLPYLRAVIKEAMRLHPVAPILLPHQAAEDGVEIGGYAVPKGSTVIFNVWAIMRDPTAWERPDEFMPERFLQRAEVDFRGKDFEFMPFGAGRRLCPGLPMAERVVPFILASLLHAFEWRLPDGMSAEELDVSEKFTTANVLTVPLKAVPILASSASELQAS

SEQ ID NO: 11086 - protein, 497 aa, Bradyrhizobium japonicum USDA 110
MTPTAAARAQHATATLRDRLKDPSLLKEACYIDGAWVGTPVFAVNNPATGVELAKVPQLGADDTTKAVEAAERAFPAWAKHTAKQRSNILRKWFELIIANREDLALILTSEQGKPLSEALGEVDIGAAYIEFFAEEARRVYGETIPTQRPDARLLAIKQPIGVCGAITPWNFPNSMITRKVSPALAAGCTVVLKPANETPLSALALAVLAEKAGIPKGVLNIITGDAPPIGKVLCEHPAVRFVGFTGSTAVGKILYQQASVGVKRLGLELGGNAPFVVFDDADIDAAVEGAIVSKYRNMGQTCVCANRLYAQDKIYDEFVQKLSKKVAVMKIGDGTEAGVTQGPLINLKAVDKVERHIADAVKRGAKVVTGGKRSELGRSFFEPTVLADVKPDSLVAQEETFGPLAPVIRFKDEADVIAMCNASPFGLASYFYSRDLGRVWRVAEALESGMVGVNTGLITTEVAPFGGVKESGLGREGSRHGMEEYVEIKYVMMAGV

SEQ ID NO: 11087 - protein, 334 aa, Bacillus sp. KSM-K16
MSTVRNIALITSGGDAPGLNGAIAAIAQTPDVNLYFYHGGFDGIIEQDPIAISPTTAREAVQQGELLCFSGRSTHMLHEAGQKRVLEKLKQDCIDALIVCGGNGSAQGARSLSAGLPVAVVPMTIDNDIGGSEYTIGHDTAVNAIAESLHRLRQTAANLPGRIFMVETFGGRCGQLPLAAAVAASADIVLLPEYELNIDKFITEVNARSARGKSVIIVVSEGIYLNKRFSAGDQGVSFALARALEESTGKRVRLSILGYTQRAGDPTSYDCLMAKQMGQCAVDALLNGEKAMLVALKEGRVKAIPLTAIEQAPTLAKELLQLAFKENQLIQLEG

SEQ ID NO: 11088 - protein, 193 aa, Nicotiana tabacum
MAFAGTTQKCMACDKTAYLVDKLTADNRIYHKACFRCHHCKGTLKLGNYNSFEGVLYCRPHFDQLFKQTGSLDKSFEGTPKIVKPQKPIDSGKPQVAKVTSMFGGTREKCFGCKKTVYPTEKVSVNGTPYHKSCFKCSHGGCVISPSNYIAHEGRLYCKHHHIQLIKEKGNLSKLEGDHEMNSTTTTEVTAES

SEQ ID NO: 11089 - protein, 442 aa, Acinetobacter sp. ADP1
MLYSIFIAHQESWMVDQFDLEHIWHPYTSMINPLPTFKVKRASGVMIELDDGRQLIDGMSSWWCAIHGYNHPALNQAVKDQLEQMSHIMFGGFTHDPAIELAKILLKITPPSLDKIFYADSGSVAVEVALKMAVQYWTAQGQHQKTNFITTRSGYHGDTWNAMSVCDPVTGMHQIFGASLPNRVFVSAPKSRFDGEWDSSEMDEVEQLIQQHTQLAAFIIEPIVQGAGGMRFYHPEYLRQLKQLCEKYQLLLIFDEIATGFGRTGKLFAWEHAQVEPDIMCIGKGLTGGYMTLSATLTSQHVAEVISRGEAGVFMHGPTFMGNPLACAVALKSTQLLVEQDWQSNIRRIENRLQPLYQLAALAHVADIRTLGAIGVVELKHNVDMKTLQQQFVELGIWIRPFGKLVYVMPPYIISNDELDELIQKMMNVVRQLSCEAQHGIA

SEQ ID NO: 11090 - protein, 450 aa, Triticum aestivum
MSTCAASLAPLLGTAAANATDYLCNQFADTTTAIDSTYLLFSAYLVFAMQLGFAMLCAGSVRAKNTMNIMLTNVLDAAAGALFYYLFGFAFAFGTPSNGFIGKHFFGLRDVPQVGFDYSFFLFQWAFAIAAAGITSGSIAERTQFVAYLIYSAFLTGFVYPVVSHWIWSADGWASASRTSGPLLFNSGVIDFAGSGVVHMVGGVAGLWGALIEGPRIGRFDHAGRAVALRGHSASLVVLGTFLLWFGWYGFNPGSFLTILKSYGPPGSIHGQWSAVGRAAVTTTLAGSTAALTTLFGKRLQTGHWNVLDVCNGLLGGFAAVTAGCSVVDPWAAIICGFVSAWVLIGLNKLAARFKFDDPLEAAQLHGGCGAWGVIFTALFARREYVEQIYGAPGRPYGLFMGGGGRLLGAHVVLILVIAAWVSCTMGPLFLALNKLGLLRISAEDQMAGM

SEQ ID NO: 11091 - protein, 258 aa, Triticum aestivum
MSATCAADLAPLLGAAAMNATDYLCNRFADTTSAVDSTYLLFSAYLVFAMQLGFAMLCAGSVRAKNTMNIMLTNVLDAAAGALFYYLFGFAFAFGTPSNGFIGKHFFGLKDMPQTGFDYSFFLFQWAFAIAAAGITSGSIAERTQFVAYLIYSAFLTGFVYPVVSHWIWSVDGWASAARTSGPLLFKSGVIDFAGSGVVHMVGGIAGFWGALIEGPRIGRFDHAGRSVALKGHSASLVVLGTSCSGSAGTVQPGSFVT

SEQ ID NO: 11092 - protein, 346 aa, Corynebacterium efficiens YS-314
MGAMRIATLTSGGDCPGLNAVIRGIVRTASNEFGSTVVGYQDGWEGLLADRRVQLYDDEDIDRILLRGGTILGTGRLHPDKFRAGIDQVKANLADAGIDALIPIGGEGTLKGAKWLADNGIPVVGVPKTIDNDVNGTDFTFGFDSAVSVATDAIDRLHTTAESHNRVMIVEVMGRHVGWIALHAGMAGGAHYTVIPEVPFDISEICKRMERRFQMGEKYGIIVVAEGALPKEGTMELREGEVDQFGHKTFTGIGQQIADEVHRRLGHDVRTTVLGHIQRGGTPTAFDRVLATRYGVRAARACHEGQFNTVVALKGERIRMISFDEAVGTLKKVPMERWVTAQAMFG

SEQ ID NO: 11093 - protein, 191 aa, Nicotiana tabacum
MTFAGTTQKCSACEKTVYLVDRLAADNRIYHKACFRCYHCKSTLKLSNFNSFEGVIYCRPHFDQLFKRTGSLDKSFEGTPKVTKPEKPVDNENGSGSKVSSLFAGTREKCVGCTKTVYPIEKVSVNGTAYHKACFKCSHGGCTISPSNYIAHEGRLYCKHHHIQLFKEKGNYSQLESDHETDPALSTQSLT

SEQ ID NO: 11094 - protein, 406 aa, Ralstonia metallidurans CH34
MLSAASRPYIDASVPVLREHGLAITTHFYREMFAARPELKRIFNMGNQANGSQQQSLASAVFAYAANIDRADVLAPVVERIVHKHVAVGLTPAHYPIVGKYLLEAIAAVLGDAATPPLLAAWDEAYWLLAGELIAAEARLYERHGVAAGELLRVRVVNREQEGDQVVALTLAAEDGSPLRDFAPGQYISVEASFADGRRQLRQYSLSGERGLPTWRISVKREDGASDAPAGTVSNWLHENAQVGTTLHVSTPWGDFAPELDSRQPIVLMSAGIGVTPMVSVLRTLAHENPHRPVLFAHAARHGRQHAHRRDLAWARERMPNLRTHVSYETPQSVDASGRDYDHAGTMPVEALLKSGDNAAFNDARFYLCGPLGFMQEQRRALIASGVPVGHIHREVFGPDLLDDIL

SEQ ID NO: 11095 - protein, 504 aa, Sinorhizobium meliloti
MVMTVVVRPKALGDYDTREFRMLIDGQWVDGAEGRTIERVAPGHGVVVSRYQAAAKADAERAIAAARRAFDEGPWPRMTASERSLILLRAADMIAARADELAFLDAVESGKPISQAKGELAGAADIWRYAAALARELSGESYNTLGEGTLGVVLREPIGVVSIITPWNFPFLIVSQKLPFALAAGCTTVVKPSELTSASTLVLGEILEAAGVPQGVVNIIVGTGPEAGAPLTTHPHVDMVSFTGSTGIGQLTMANAAQTLKKVSLELGGKNPQIVFPDANLDEFIDAAVFGAYFNAGECCNAGSRLILHRDIAEEVTARIASLSAKVKVGDPLDPETQVGAIITPQHLQKIAGYVSSASNEGARIAHGGTTLDLGMGQFMAPTILSAVRPEMAVAREEVFGPVLSVLTFEKTEEAIRIANSIDYGLSAGVWSRDFDTCLTIGRRVRAGTVWMNTFMDGASELPFGGYRQSGLGRELGRHAVEDYTETKTLNMHIGRRSNWWMPR

SEQ ID NO: 11096 - protein, 286 aa, Burkholderia cepacia
MDASEFSKFLKAALPAQAIAGAALTVAEVEIPGYAQDIVLRLYRRPDKTGLPVVLYFHGGGFVRGSLEDADFAARFLAERLPALVVSVDYSLAPAFPFPAAPEDAYRAAVWAATRARAFGGNPKKIGVAGHDAGGQLANCLAFIARDRGEVSIAAQALFGPMLDPSMTRIGDAERLASDITARECAACYRAYLPQAAQRMHPYAAPIESVRLAGLPPTLVVTAQNDVLHVEAENYAGCLISSGVLTQVIRYPDITHAALATHEAAFEEAVRFFQCRFQARQPNRPE

SEQ ID NO: 11097 - protein, 367 aa, Arabidopsis thaliana
MGHLIPQTGDEETELGLAAVRLANCAAFPMVFKAAIELGVIDTLYLAARDDVTGSSSFLTPSEIAIRLPTKPSNPEAPALLDRILRLLASYSMVKCQIIDGNRVYKAEPICRYFLKDNVDEELGTLASQLIVTLDTVFLNTWGELKNVVLEGGVAFGRANGGLKLFDYISKDERLSKLFNRTGFSVAVLKKILQVYSGFEGVNVLVDVGGGVGDTLGFVTSKYPNIKGINFDLTCALTQAPSYPNVEHVAGDMFVDVPKGDAILLKRILHDWTDEDCEKILKNCWKALPENGKVIVMEVVTPDEADNRDVISNIAFDMDLLMLTQLSGGKERSRAEYVAMAANSGFPRCNFVCSAYHLWVIELTKQA

SEQ ID NO: 11098 - protein, 442 aa, Arabidopsis thaliana
MVDSDPVEFPPENRRGQLFGKYEVGKLVGCGAFAKVYHGRSTATGQSVAIKVVSKQRLQKGGLNGNIQREIAIMHRLRHPSIVRLFEVLATKSKIFFVMEFAKGGELFAKVSKGRFCEDLSRRYFQQLISAVGYCHSRGIFHRDLKPENLLLDEKLDLKISDFGLSALTDQIRPDGLLHTLCGTPAYVAPEVLAKKGYDGAKIDIWSCGIILFVLNAGYLPFNDHNLMVMYRKIYKGEFRIPKWTSPDLRRLLTRLLDTNPQTRITIEEIIHDPWFKQGYDDRMSKFHLEDSDMKLPADETDSEMGARRMNAFDIISGSPGFNLSGLFGDARKYDRVERFVSAWTAERVVERLEEIVSAENLTVAKKETWGMKIEGQKGNFAMVVEINQLTDELVMIEVRKRQRAAASGRDLWTDTLRPFFVELVHESDQTDPEPTQVHTTS

SEQ ID NO: 11099 - protein, 468 aa, Pasteurella multocida subsp. multocida str. Pm70
MKSRMLGDYNKLFRLCKYLREFTPVERAIHNRGETMNEQQLLECDRQHIWHPYAALNADFPLFVVERAEGVYIQLKNGQQLIDGMSSWWSAIHGYNHPRLNHAATQQLSQMSHVMFGGLTHQPAVELAQQLVNILPESLDKIFFADSGSVAVEVAMKMAVQYQHAKGETQRCKFATIRSGYHGDTWHAMSVCDPVTGMHSLFAKGLPVQYFLPQPPVKFGQAWQPEAMQPLQDLLAQHGDEIAGLILEPVVQGAGGMYFYSPEYLVQAKALCEQYGILLIFDEIATGFGRTGKLFACEHANVVPDVMCIGKALTGGYLTLSATITNQTVADVICSGEAKCFMHGPTFMANPLACAVAAESIKLLLASPWQQRIQQIEQQLRQELRQAEALDCVAEVRVLGAIGVIEMKAPVNMASLQPRFVQNGVWVRPFGKLVYLMPPYIISSDQLSQLIHGTIRTLQEEYAHKESL

SEQ ID NO: 11100 - protein, 413 aa, Magnetospirillum magnetotacticum MS-1
MPTPLSARTIAVVKATIPALETHGLTITRRMYERLFQNTDIRDLFNQSHHGETGSQPKALALAVLAYARNIDNLGVLTGAVERIAQKHVALNILPEHYSFVADALIGAIQDVLGEAATPEIVEAWGEAYWFLAELLIGREATIYRDLASKSGGWNGWRDFVVESVTPESEIIRSFVLVPADGGPVLRHEPGQYLGFLLDLPGRGVLKRNYSISCAPNDRAYRITVKREAKTEHPAGLVSNWLHDAAIAGTVLKVAAPAGDFFLDRSSNAPVVLVSGGVGLTPMVSMLESITETTPERPTWFVHSALNGRVHALREHVRNLAANRDNLRVRIFYTAPEAQDRVGEAYDIPGPVTAEWLVANTPSEQATYYLCGPKSFLASLANGLVRAGIPAERVRFEFFGPADALLEEPKQAA

SEQ ID NO: 11101 - protein, 196 aa, Triticum aestivum
  misc_feature (191)..(191): Xaa can be any naturally occurring amino acid
MHPTRWELSHMVDLQAAGLVISVVAAEVDSGGSSEMSDTDEHHFESKADSGASKTYPQQAGAIRKGGHIVIKARPCKVVEVSTSKTGKHGHAKCHFVAIDIFNGKKLEDIVPSSHNCDVPHVDRQDYQLIDITDDGYVGLLTESGNTKDDLKLPTDDVLLGQIKTGFADGKDLILSVMSAMGEEQICAVKXIGGGK

SEQ ID NO: 11102 - protein, 502 aa, Ralstonia solanacearum
MAQLLTVSEYAAMAGKLALPTQAFIDGAFVPAVSGKTFQTTNPATGNVLAEIAACDTRDVDIAVAKAKAAFEDGRWHRRSPAQRKATLLRLADLLEQHAHELAVMESLDSGKPIRECQATDVPETIHTIRWHAELIDKIYDSTAPVGSNALSLVVREPIGVVGLVLPWNFPLLMLAWKIGPSLAAGCSIIVKPAKETSLTALRVAELAHEAGVPAGVFNVLPGGGKEVGEPLGRHMDVSMVSFTGSTDTGRLFLKYAADSNLKRIVLECGGKNPAVVMNDVDDLDAVAQHVVNGAFWNMGENCSASSRLIVHADVKDALLARIGVHMREWKMGNPLDPEHRVGSLVSESHFRKVRSYLEHAGAEQLRVAFGGGTEGGIFVEPTVVDGVGQGSLLFREEIFGPILSVTTFTRMEDAIALANDSVYGLAASVYTDSLNNAIRLSREIRAGVVTVNCFGEGDVTTPFGGYKESGFGGRDKSIWAHDQYTEIKTIWIDVPDCTAAK

SEQ ID NO: 11103 - protein, 129 aa, Corynebacterium diphtheriae NCTC 13129
MPQGKVLWYDVDKGFGFVSNPEGDDCFVSKDVLPQGVQKLEKGQRVEFDYVARGRGPQALRIKVLDTPRLRRPAQHKYSAEELNSMISDLATLLEIKVQPSLRAGRYPDRKEGRQVANILRAVAKELDM

SEQ ID NO: 11104 - protein, 113 aa, Rickettsia sp. Hj126
ANEAVINMLKEIGSSEYIPKYIAKAKDKNDPFRLMGFGHRVYKNYDPRAAVLKETCKEVLKELGQLDNNPLLQIAIELEAIALKDEYFIERKLYPNVDFYSGIIYNAMGIPTQ

SEQ ID NO: 11105 - protein, 319 aa, Clostridium acetobutylicum ATCC 824
MKTIAVLTSGGDAPGMNAAIRAVVRTAIEKGINVKGIQRGYSGLINGEIFDMNRHSVSDIIQRGGTILRTARCPEFLKEEVRQKAANVLRVFGIDGLVVIGGNGSFMGAQKLSKLGVKTVGLPGTIDNDLPYTDYTIGFDTTLNTVLDAINKLRDTSTSHERVSIIEVMGRDCGDIALFSGIAGGAESVIIPEIGYDFNELCKNILEGKLRGKMHNLIILAEGVGGAAELAKKVEEVTGIETRSTILGHIQRGGSPSAFDRMLASRMGVKAVEVLMEGKTSRVIGIKEGKIMDQDIDEALAVPRSFNKELYDIANMLSK

SEQ ID NO: 11106 - protein, 370 aa, Sinorhizobium meliloti
MTVRNLFLLPGDGIGPEAMAEVRKIIAYMNAERDAGFVTDEGLVGGSAYDAHGAAISEGDMAKALAADAVLFGAVGGPKWDAVPYEVRPEAGLLRLRKDLELFANLRPAICYPALANASSLKPELVEGLDILIVRELTGGVYFGEPKEIVDLGNGQKRGIDTQVYDTYEIERIAGVAFELARTRNNRVCSMEKRNVMKSGVLWNQVVTETHKAKYSDVQLEHMLADAGGMQLVRQPKQFDVIVTDNLFGDMLSDVAAMLTGSLGMLPSASLGAPDAKTGKRKALYEPVHGSAPDIAGTGVANPIAMIASFAMCLRYSFNLVKEADDLEKAIANVLDQGIRTGDIMAEGCRKVGTAEMGDAILAEFKSLSA

SEQ ID NO: 11107 - protein, 140 aa, Triticum aestivum
  misc_feature (117)..(117): Xaa can be any naturally occurring amino acid
  misc_feature (129)..(129): Xaa can be any naturally occurring amino acid
MAPTVMASSATSVAPFQGLKSTAGLPISRRSSSAGLSSVSNGGRIRCMQVWPIEGIKKFETLSYLPPLSTEALLKQVDYLIRSKWVPCLEFSKVGIVFREHNSSPGYYDGRYWTMWXLPMFGCTDATQXLNEVEEARRST

SEQ ID NO: 11108 - protein, 255 aa, Populus deltoides
MGRGRVQLKRIENNISRQVTFSKRRTGLLKKAHEISVLCDADVAVIVFSTKGKLFEYSTDSSMESILERYERCSYAEQQFVPHGPEHQGSWFLEHPKLRARVELLQRNLRNYTGQDLDPLSYKELHHLEQKIDTALKSVRSRKNQLVHESLAEMQKKEKALQDQNNILVEQVKKKLKALTEQAQWEQQNLGQNSSSFMLPQAQPPLQPSMLSHPPPTLGGSFQIRGFLNGNKDVEVQTQPSTMPHWMLRHVNDRI

SEQ ID NO: 11109 - protein, 424 aa, Clostridium acetobutylicum ATCC 824
MIIIKNGYVIDPLTKREGKFDILIDGENVVRISQDIGIDDDIEVIDAEDCIVSPGFIDIHSHFRDPGFTEKEDIITGARAAARGGYTTVICMANTNPVVDNVETLRYIVDKAKTAKIEVLQVGTITKGMQGVELVDMEALKEAGAVGFSDDGKPIMDSRLVLEAMQKARELDVPLSFHEEDPKLVYESGINGGKVAEKLNMMGALEEAETVLTARDAALAVSSGAKTNIQHISSKISLGIIKLAKEMGANIIAEATPQHFSITEEEILNCGTNAKVNPPLRREDDRKAIVAALKDDTIQVIATDHAPHTKDEKAREFKEAPSGMIGLETALSLAVTNLVKTGDLTYRDMISKLTINPARFYNLDRGYIKEGHRADIVIFDPDEKYTVKEEEFQSKASNSPFIGKELFGKVKTTIYNGKIVYEDK

SEQ ID NO: 11110 - protein, 168 aa, Zea mays
  misc_feature (42)..(42): Xaa can be any naturally occurring amino acid
  misc_feature (72)..(72): Xaa can be any naturally occurring amino acid
  misc_feature (126)..(126): Xaa can be any naturally occurring amino acid
  misc_feature (144)..(144): Xaa can be any naturally occurring amino acid
MGMSLVNITNVAVLDNSSTFINPGQFGVSSECLVSIDGHLKXKLLYVGSVEDDISGHQLESGLVGPDNVGPXRCVLQTDPPDPSKLCEEYIFGASELLLHCTYMGQEFMTVECYLGHYYADVLLRXSLQRKVVIFGVQRTLVAXTKPQITKFHISIHLEAEYVGRDPA

SEQ ID NO: 11111 - protein, 360 aa, Triticum aestivum
MGSTAADMAASADEEACMYALQLVSSSILPMTLKNAIELGLLETLVAAGGKLLTPAEVAAKLPSTANPAAADMVDRMLRLLASYNVVSCTMEEGKDGRLSRRYGAAPVCKFLTPNEDGVSMAALALMNQDKVLMESWYYLKDAVLDGGIPFNKAYGMSAFEYHGTDPRFNRVFNEGMKNHSIIITKKLLEVYKGFEGLGTIVDVGGGVGATVGAIVAAYPAIKGINFDLPHVISEAPPFPGVTHVGGDMFQKVPSGDAILMKWILHDWSDEHCATLLKNCYDALPAHGKVVLVECILPVNPEATPKAQGVFHVDMIMLAHNPGGRERYEREFEALAKGAGFKAIKTTYIYANAFAIEFTK

SEQ ID NO: 11112 - protein, 454 aa, Arabidopsis thaliana
MNEDRISDLPDALLLQILSSLPTENAIATSVLSKRWRSLWTMLPKLKFDSNFNPVFDDDNIDPTMFSENVYKTLSLHKAPVLESLHLSFEGRTDCLHVGIWIATAFARGVRKLVLDSFYQEDQTVTLPSVLFSYNDSLEILKLKCAIDLDFPSRVCLKSLRKLYLDQVHFKDEESVCNLLCGCPSLQDLVVHRYSNADVATFTIASPSLQRLTIEDLRQEGGYGNGSYVINAPGLKYLNINGVIDIESCLIDKALELEEAKISNVSGITNENILESLTSAKRLILHLSPLEVKVPTGKIFDQLGCLELLTHEREWWNLLSIMLDSSPKLQILKLTDVSNFTSCLFPQLHFQVYLHDNKTNPDERKWNPPKCAPECLLFHLETFLWIGYEWQRGDEKEVATYILENARRLKKATFSTKRIGREKLEDFEKRREMLNELAIVLWDSNSCHLVFEST

SEQ ID NO: 11113 - protein, 176 aa, Glycine max
ELEDMKKRLKEIEEEASALREMQAKVEKEMGAVQDSSGTSATQAEKEEVDARSIYVGNVDYACTPEEVQQHFQSCGTVNRVTILTDKFGQPKGFAYVEFVEIDAVQNALLLNESELHGRQLKVSAKRTNVPGMKQYFGRRPAGFRSRRPFMSAPFFPPYGYGRVPRYRRPTRYRPY

SEQ ID NO: 11114 - protein, 157 aa, Triticum aestivum
GTRQPFPQQPQQPFPQPQLPFPQQSEQIIPQQPQQPFPLQPQQPFPQQPQQPFPQPQQPIPVQPQQSFPQQSQQSQQPFAQPQQLFPELQQPIPQQPQQPFPLQPQQPFPQQPQQPFPQQPQQSFPQQPQQPFPQQPQQPYPQQQPYGTSLTSIGGQ

SEQ ID NO: 11115 - protein, 177 aa, Dunaliella salina
SVAYKNVIGARRASWRIISSIEQKEESKGNEEHVQRIRSYRKMVEKELSDICSSILQLLDEHLIPTASTGESKVFYLKMKGDYHRYLAEFKTGSDRKEAAEHTLLAYKAAQDIALVDLPPTHPIRLGLALNFSVFYYEILNSPERACHLAKQAFDEAIAELDTLGEESYKDSTLIMQ

SEQ ID NO: 11116 - protein, 497 aa, Pseudomonas saccharophila
MKNQVQLITYVDRLGGQRDGADLARLKKLLCEPGQPLADVFGGVHLLPFFHAIDGADAGFDPIDHTLVDPRLGDWSDIKALTEGLEVMGDVIVNHMSSESPQFQDFSAKGRESAYDGLFLTLDAVFPNGATERDLLTVYRPRPGPAAELCDAEERRARILWTTFTAAQIDIAVHHPQGRAYLESILQTFAANGIRMVRLDAVGYAIKKAGASCFMMPETFGFIAEFAQAARALGIEVLVEIHAYYQRQIEIASQVDWVYDFALPPLVLHAFEFKTAGALKRWIAVRPTNALTVLDTHDGIGIIDIGADASDRAAHPGLVPPEELDALVERIHAASQGQSRKPTGAAASNLDLYQVNCSFFDAMGRNETAYLLARAIQFFLPGVPQVYYVGLLAGHNDMELLARTQVGRDINRHYYDAAEIASDCERPVVRRLIELIRLRNRHPAFGGVFSVEAGGDDELHLRWQQGGDWGPLRVNFASLDHELSCSRRRRDRAFAFS

SEQ ID NO: 11117 - protein, 149 aa, Glycine max
MEPMDIVGKAKEDASLPKATMTKIIKEMLPPDVRVARDAQDLLIECCVEFINLVSSESNEVCNKEERRTIAPEHVLKALGVLGFGEYIEEVYAAYEQHKLETMQDSLKGAKWSNRAEMTEEEALAEQQRMFAEARARMNGGAITSKQPD

SEQ ID NO: 11118 - protein, 214 aa, Zea mays
MAAVEVCVKAATGKPDTLGDCPFSQRVLLTLEEKKVPYEVKLVDLDNKPEWFLKISPEGKVPVFNGGDGKCIADSDVITQTIEEKFPTPSLVTPVEYASVGSKIFPAFITFLKSKDASDGSEKALLDELQALDEHLKAHGPYINGENVSAADLSMGPKLFHLQVALEHFKGWKIPENLTNVHAYTKAFFSRESFVKTKPSEEHVIAGWAPKVNA

SEQ ID NO: 11119 - protein, 181 aa, Arabidopsis thaliana
MSQLGVETSQAQPETPQSTTFLDLLRLQMDGLDRSRRRKRTLKERLGFKRIGCCGPTWGLRLTSNTGEDDDEPFENRLVSGSDHVTGPLNQGMNLATALAAERNYRTEETEASGSLTPLKVSLMRLLEETAERVVVEENETERVTASASSTVRGVNNDSVWLNRGSCPLCNRPIIEILDIY

SEQ ID NO: 11120 - protein, 506 aa, Oleomonas sagaranensis
MIHQTIEEISKSIAFRSRYDNFIGGKWVAPVRGQYFDNITPITGMPVAQIARSTAEDIELALDAAHAAKDAWGRTSVAERARLLNKIADRMEEKLDLLAMVETIDNGKPIRETKAADLPLAIDHFRYFASCVRAQEGSIGEVDHDTMAYHFHEPLGVVGHIIPWNFPLLMACWKLAPALAAGNCVVLKPAEQTPLSIMVWADLIGDILPPGVLNIVNGFGIEAGKPLASNKRIAKIAFTGETTTGRLIMQYASENLIPVTLELGGKSPNIFHEDVAAEDDDYFDKAIEGFVLFALNQGEVCTCPSRAIIHEKIYDKFMERALARVAAIKQGSPLEAATMLGAQASNDQLEKILSYIDIGKAEGAELLIGGERNILGGELAGGYYVKPTVFRGNNKMRIFQEEIFGPVVSVTTFKDEAEALSIANDTLYGLGAGVWTRDGNRAYRFGRAIQAGRVWTNCYHLYPAHAAFGGYKQSGIGRETHKMMLDHYQQTKNLLVSYSPKALGFF

SEQ ID NO: 11121 - protein, 447 aa, Chlorobium tepidum TLS
MSDSDHRNSLTIIDNRTGKSYELPIENGTIRTMDLRKIKESEDDFGLLGYDPAFLNTCSCKSTITFIDGDKGILRYRGYPIEQLAEKSSFLETAYLLIKGELPDKERLAVWTYNIRHHTMTHANLTKFMDGFRYDAHPMGILVGTLGALSTFYPDAKNVGEEESRKLQVRRLIGKMPTLAAMSFRHSLGFPYVLPDNDLSYAGNFLSMMFRMTEKNYKPNPVLEHALDVLFILHADHEQNCSTNAVRSVSSSMVDPYSAIAAGCAALYGPLHGGANEAVIHMLKQIGSVDKIPEFIKLVKSGEGRLMGFGHRVYKNYDPRARIIKKIAFDVFEETGRNPLLDIAIELERIALEDDYFIQRKLYPNVDFYSGLIYQAMGFPTEMFPVLFAIGRTPGWLAQWIEHVKDPEQKIARPRQIYLGEKCRDYVPIDERPRKGDDEQKFGICRL

SEQ ID NO: 11122 - protein, 316 aa, Escherichia coli
TDKLTSLRQYTTVVADTGDIAAMKLYQPQDATTAPSLILNAAQIPEYRKLIDDAVAWAKQQSNDRAQQIVDATDKLAVNIGLEILKLVPGRISTEVDARLSYDTEASIAKAKRLIKLYNDAGISNDRILIKLASTWQGIRAAEQLEKEGINCNLTLLFSFAQARACAEAGVFLISPFVGRILDWYKANTDKKEYAPAEDPGVVSVSEIYQYYKEHGYETVVMGASFRNIGEILELAGCDRLTIAPALLKELAESEGAIERKLSYTGEVKARPARITESEFLWQHNQDPMAVDKLAEGIRKFAIDQEKLEKMIGDLL

SEQ ID NO: 11123 - protein, 464 aa, Burkholderia cepacia R1808
MKQSIDALLRADRAHFMHPSTHAYDHESGALPGRIVRGAHGIHIEDHEGRRYIDAFAGLYCVNIGYGRTEVADAMHEQAKQLAYYHTYVGHASDAIIELSSRIIECAPVGMKKVYYGMSGSDANETQVKLVWYYNNVLGRPNKKKIISRERGYHGSGIVTGSLTGLPSFHQHFDLPIDRVKHTVCPHWYRNAPVGMSEAQFVAYCVDELEKLIAREGADTIAAFIAEPVMGTGGIIAPPAGYWPAIQAVLRQHDILLISDEVVCGFGRLGSKMGAQHFGIEPDLITVAKGLTSAYAPLSGVIVGDKVWDVIARGSQAHGPMGHGWTYSGHPVCAAAALANLAILERENLVGNAAEVGAYFGAKLRDAFGAHPLVGEVRSVGMLAALEFMADRDARTPFDPALKIGAQVSAAALRRGVIARAMPHGDILGFAPPLVMTRAEADEIVGIVKEAVDEVAERNLAAVS

SEQ ID NO: 11124 - protein, 316 aa, Escherichia coli
TDKLTSLRQYTTVVADTGDIAAMKLYQPQDATTNPSLILNAAQIPEYRKLIDDAVAWAKQQSNDRAQQIVDATDKLAVNIGLEILKLVPGRISTAVDARLSYDTEASIAKAKRLIKLYNDAGISNDRILIKLASTWQGIRAAEQLEKEGINCNLTLLFSFAQARACAEAGVFLISPFVGRILDWYKANTDKKEYAPAEDPGVVSVSEIYQYYKEHGYETVVMGASFRNIGEILELAGCDRLTIAPALLKELAESEGAIERKLSYTGEVKARPARITESEFLWQHNQDPMAVDKLAEGIRKFAIDQEKLEKMIGDLL

SEQ ID NO: 11125 - protein, 435 aa, Corynebacterium diphtheriae NCTC 13129
MKGMLVATENKDKAVLHYPGGEYEMDIIHATEGNDGVVLDKLLSQTGMVTFDPGYVSTGSTESKITYIDGDNGILRHRGYDIADLAENATFNEVSYLLIKGHLPTVDELHKFNNEIRHHTLLDEDFKSQFNIFPRDAHPMSVLASSVNILSTYYQDQLNPLDEEQLDKATVRLLAKVPMLAAYAYRASKGAPYMYPDNSLNARENFLRMMFGYPTEPYEVDPVVAKALDKLLILHADHEQNCSTSTVRMIGSAQANMFVAVAGGINALSGPLHGGANQAVLEMLEEIKANGGDATDFMNRVKNKEKGVRLMGFGHRVYKNYDPRAAIVKETAHEILEHLGGDELLDLAMKLEEIALSDDYFVSRKLYPNVDFYTGLIYRAMGFPTDFFTVLFAIGRLPGWIAQYREQLATTTKINRPRQIYTGETLRKVTPREQR

SEQ ID NO: 11126 - protein, 492 aa, Burkholderia cepacia R1808
MLPGHPVLFKSMCYVDGRWIHSDSAATRAVVNPADQSVIGHVPMLERAQIVGAVDAAQRAFGTWRWTPQAARSAALLRWHALILRHLDDLAALLSLEQGKPLAEARGEIRYAASFVEWFANEAKRAVGRTIPTHIDGAHLGTVMEPVGVAALITPWNFPAAMITRKAAAALAVGCTVIVKPAHETPFSALALAQLADEAGFPAGVFNVVLGEPQMAMEALVGDARVRAVSFTGSTRVGRLVTETAAKAGIRKIALELGGNAPFIVTDDADLDDAVRIAVGAKFQTSGQDCCAANRIFVARALYDAFVGRYASAVRALKTGPAFEPGVDVGPLMHQAAFDATVARVDDARARGARIVAGGRPHALGGWFYEPTVIADAAPGMRVYDEENFAPISAVCAFDTLDEVVARANDTEYGLAAYVCATRIDTIFRLVRRLDFAMVSVNGVKFTGAPIPFGGMKASGLGREGGVEGFEPFTETKYFCFGNLGLPVAATA

SEQ ID NO: 11127 - protein, 221 aa, Zea mays
  misc_feature (204)..(204): Xaa can be any naturally occurring amino acid
MARRAASSLVSRCLLARAPAGAPPAAPSAPRRTDGMHRLLPGVLQRFSTAAAVEEPITPSVHVNYTKLLINGNFVDSASGKTFPTLDPRTGEVIAHVAEGDAEDINRAVAAARKAFDEGPWPKMTAYERSRILLRFADLIEKHNDELAALETWDNGKPYEQAAQIEVPMVARLMRYYAGWADKIHGLIVPADGPHHVQILHEPXGVAGQIIPWNFPLLMYG

SEQ ID NO: 11128 - protein, 579 aa, Glycine max
MCGILAVLGCSDSSQAKRVRVLELSRRLKHRGPDWSGLHQYGDNYLAHQRLAIVDPASGDQPLFNEDKTVVVTVNGEIYNHEELRKQLPNHTFRTGSDCDVIAHLYEEHGENFMDMLDGIFSFVLLDTRDNSFIVARDAIGVTSLYIGWGLDGSVWISSELKGLNDDCEHFESFPPGHLYSSKERAFRRWYNPPWFSEAIPSAPYDPLALRHAFEKAVVKRLMTDVPFGVLLSGGLDSSLVAAVTARYLAGTKAAKQWGTKLHSFCVGLEGAPDLKAAKEVAEYIGTVHHEFHYTVQDGIDAIEDVIYHIETYDVTTIRASIPMFLMSRKIKSLGVKMVISGEGSDEIFGGYLYFHKAPNKEEFHQETCRKIKALHKYDCLRANKSTFAWGLEARVPFLDKEFIRVAMNIDPECKMIKKEEGRIEKWALRRAFDDEEHPYLPKHILYRQKEQFSDGVGYGWIDGLKAHAEKHVTDRMMLNAANIFPFNTPTTKEAYHYRMIFERFFPQNSARLTVPGGPSVACSTAKAVEWDAAWSNNLDPSGRAALGVHASAYGNQVKAVEPEKIIPKMEVSPLGVAI

SEQ ID NO: 11129 - protein, 316 aa, Escherichia coli
TDKLTSLRQYTTVVAATGDIAAMKLYQPQDATTNPSLILNAAQIPEYRKLIDDAVAWAKQQSNDRAQQIVDATDKLAVNIGLEILKLVPGRISTEVDARLSYDTEASIAKAKRLIKLYNDAGISNDRILIKLASTWQGIRAAEQLEKEGINCNLTLLFSFAQARACAEAGVFLISPFVGRILDWYKANTDKKEYAPAEDPGVVSVSEIYQYYKEHGYETVVMGASFRNIGEILELAGCDRLTIAPALLKELAESEGAIERKLSYTGEVKARPARITESEFLWQHNQDPMAVDKLAEGIRKFAIDQEKLEKMIGDLL

SEQ ID NO: 11130 - protein, 214 aa, Helianthus annuus
MKSFTGTTQKCTVCEKTVYLVDKLVANQRVYHKACFRCHHCNSTLKLSNFNSFDGVVYCRHHFDQLFKRTGSLEKSFDGTPKFKPERTFSQETQSANRLSSFFEGTRDKCNACAKIVYPIERVKVDGTAYHRACFKCCHGGCTISPSNYIAHEGRLYCKHHHIQLFKKKGNYSQLEVEETVAAPAESETQNAETQNAETQNADTQNTDTQNAAV

SEQ ID NO: 11131 - protein, 108 aa, Brassica rapa subsp. pekinensis
FVTFLKSIDSSDGSEKALLDELEALETHLKTHDGPFIAGGKVSAVDLSLAPKLYHLKVALGHYKSWSVPESLPHVHGYMKALFSLDSFEKTKTEERYVIAGWEHKVNP

SEQ ID NO: 11132 - protein, 316 aa, Escherichia coli
TDKLTSLRQYTTVVADTGDIAAMKLYQPQDATTNPSLILNAAQIPEYRKLIDDAVAWAKQQSNDRAQQIVDATDKLAVNIGLEILKLVPGRISTEVDARLSYDTEASIAKAKRLIKLYNDAGISNDRILIKLASTWQGIRAAEQLEKEGINCNLALLFSFAQARACAEAGVFLISPFVGRILDWYKANTDKKEYAPAEDPGVVSVSEIYQYYKEHGYETVVMGASFRNIGEILELAGCDRLTIAPALLKELAESEGAIERKLSYTGEVKARPARITESEFLWQHNQDPMAVDKLAEGIRKFAIDQEKLEKMIGDLL

SEQ ID NO: 11133 - protein, 290 aa, Corynebacterium diphtheriae NCTC 13129
MVTMKQHENIIPTITLNDGTEMPAIGFGTYKLREQDAYRAVRSAIEVGYRHIDTASLYKNEEEVGRAVADAITAGEVARDELFITTKVWNDMHGDQLTQRSFQESLHRLGLDYIDCCMVHWPWPQKGLYVESFAALAKIQGLGQLQSVAVANFYPEVLREIVAETGIAPVLNQVELHPGFSQAEQRAVDRELGVVTEAWSPLGRGDSLNAEAITLIAQCYEKTPAQVTLRWIHQLGCSVVPKSANPQRQRENLDIFDFELNTEDMNSITSLDEQGGRLFVDPHDFPGEVE

SEQ ID NO: 11134 - protein, 283 aa, Rhodospirillum rubrum
MTEWFSETLHPHWRQSFAADRVLLREQTAHQDLVILENQTFGRVMVLDGMVQLTERDEFVYHEMIAHVPLFGHGAARRVLIIGGGDGGTLREVLRHKTVERATMVEIDATVVEMARDHMPMVSDGAFDDPRAELIIADGIAFVAGAHQPYDVIIIDSTDPFGPAEGLFTPAFYGACRQLLTPGGVLVVQAGVPFLQPREIAHVNAALSAAFPEVAFYAIAVPTYVGGLMTLGWASEDAGKKVPDPAVLAARVAASGLAFGYYSPEGHAGAFALPPHIRAAARG

SEQ ID NO: 11135 - protein, 396 aa, Burkholderia cepacia R1808
MTLGFSEHRLAKVAAEQYSAFPGYHTFFGRNSKPTVELSERMLALAPVPMSRVFFTNSGSEANESVIKLLWMMWAAEGQPQRRKLLTRKNAYHGATVMASALTGKDYVKAFGLPTPDVITLDCPHAWRFAQAGESEEAFVKRLVSNLEKTILAEGPDTIAGMFAEPVMGAGGVIVPPAGYFEQVQAVLKKYQIPLVADEVICGFGRTGNLWGCQTVGLRPDIIVASKSMSAGYFPVGAVMLSAEIDRRATAASEQWEEFPHGFTTAGHPVACAVSLEAIRIITDEGILENVQKVGRKFQDGLRALADHPMVGDVRGVGLMGALEMVSDKSSKTSFSGELRVGERIAKAAREFGYIIRPLGASVVLAPPFITTSEQIDDLLTVLKRVLDSVYKDISG

SEQ ID NO: 11136 - protein, 175 aa, Oryza sativa
MAPSVMASSATTVAPFQGLKSTAGMPVARRSGNSSFGNVSNGGRIRCMQVWPIEGIKKFETLSYLPPLTVEDLLKQIEYLLRSKWVPCLEFSKVGFVYRENHRSPGYYDGRYWTMWKLPMFGCTDATQVLKELEEAKKAYPDAFVRIIGFDNVRQVQLISFIAYKPPGCEESGGN

SEQ ID NO: 11137 - protein, 188 aa, Helianthus annuus
MAFAGTTQKCMACDKTVYLVDKLTADNRVFHKACFRCHHCNGTLKLSNYNSFEGVLYCRPHFDQLFKKTGSLDKSFEGTPNIVKQPKTIDGEKPMANKVSSMFVGTKDKCLGCKNTVYPTEKVSVNGTAYHKSCFKCSHGGCTISPSNYIAHEGHLYCRHHHTQLIKEKGNLSQLEGERSARVGETAP

SEQ ID NO: 11138 - protein, 172 aa, Arabidopsis thaliana; identical to SEQ ID NO: 382

SEQ ID NO: 11139 - protein, 410 aa, Zea mays
  misc_feature (290)..(290): Xaa can be any naturally occurring amino acid
MASVSVVLLQRSSSRVRGYIRLQRIASSSVTLVLEGEGHWWWSNSRGRDERFGARTVHHMAGSGEGENGGVPAGGQVAMAPGVVTGGVEDAYGEDRATEDQTVTPWAVCIASGHSLLRDPRHNKGLSFTEKERDTHYLRGLLPPVVLSQDLQEKRMLQNVRQFQVPLQRYTALMDLQERNERLFYKLLIDNVEELLPVVYTPTVGEACQKYGSIFRRPQGLYISLKEKGRILEVLRNWTEKSIQVIVVTDGERILGLGDLGCQGMGIPVGKLALYTALGGVRPSAVSFNXCLPITIDVGTNNEDLLKDEFYIGLKQRRATGQEYSEFLDEFMAAVRQNYGQKVLVQFEDFANHNAFILLEKYRTNHLVFNDDIQGTAAVVLAGIIAALKSVGGTLADHTFLFFSASYTIK

SEQ ID NO: 11140 - protein, 181 aa, Oryza sativa (japonica cultivar-group)
MTEEQAVAEQQRMFAEARARMNNGAAKPKEPEPEAQQQTQQPPQPQLHPQPQQPLQPQLQLHPQPQQQPSQLHPQQLLHPQSQQTPQPQPQVHPQPQQPPQLQPQPQLLQQPQLPQQLQPQSQLPPQPQQPPQLQLQSQLHPQPQQPPQLQPQPQLHQQPQPQAELQSQSQPQTEHGLDSS

SEQ ID NO: 11141 - protein, 387 aa, Ceriporiopsis subvermispora
MAFTSLLALVALAAITRAAPTTICPDGTRVSNHVCCDFIPLAQALQSTLYMGDCGEDAHETIRLTFHDAIAISQSQGPSAGGGADGSMLIFPTVEPFFHANAGIDDSVNNLIPFLDKFPTITAGDLIQFAGTVALSNCPGAPQLEFLAGRPNATAPAVDGLIPEPQDNVTHILERFADAGGFTPFEVVSLLASHTVARADKVDLTIDAAPFDSTPFTFDTQIFLEVLLKGVGFPGTDNNTGEVESPLPLGNNKQGGNDTGEMRLQSDFALARDDRTACFWQGFVNEQEYMMSSFKAAMSKLAILGHNRNDLIDCSEVVPTPKPPVGKPASFPATTGPQDLQLTCKSERFPSLTIDHGAQETLIPHCSNGGQDCPTVQFTGPAGEDDS

SEQ ID NO: 11142 - protein, 392 aa, uncultured bacterium pCosFS1
MSVTDSDLEFDQRHIWHPYTSMSHPLPCYPVEAASGVELQLADGRRLIDGMSSWWAAIHGYNHPQLNLAATQQLEKMSHVMFGGITHPAANELCRKVVAMTPEALQCVFLADSGSVAVEVSLKMALQYWQARGERRQRILTLRHGYHGDTFGAMSVCDPDNSMHSLYQGYLAPHLFATAPQCGFDQAWDENDIAPFAALLEQHAGEVAAVILEPVVQGAGGMRIYHPTYLERVRELCDRYQVLLIADEIATGFGRTGKLFACEHAEVVPDILCLGKALTGGYMTLSATLTTRHVAETISNGAAGCFMHGPTFMGNPLACAVANASLSLLAENRWQQQVAAIETQLKQQLLPLKMQPKVADVRVLGAIGVVEMREPVDMAQLQRGFVERGVWI

SEQ ID NO: 11143 - protein, 430 aa, Glycine max
  misc_feature (44)..(44): Xaa can be any naturally occurring amino acid
MDPENQLTSNPRSIILNKYEMGRVLGQGNFAKVYHGRNLNTNEXVAIKVIKKEKLKKERLVKQIKREVSVMKLVRHPHIVELKEVMATKGKIFLVMEYVNGGELFAKVNNGKLTEDLARKYFQQLISAVDFCHSRGVTHRDLKPENLLLDQNEDLKVSDFGLSALPEQRRADGMLLTPCGTPAYVAPEVLKKKGYDGSKADIWSCGVILFALLCGYLPFQGENVMRIYRKAFRAEYEFPEWISTQAKNLISKLLVADPGKRYSIPDIMKDPWFQVGFMRPIAFSIKESNVVEDNEGKPARPFYNAFEIISSLSHGFDLRSLFETRKRSPSMFISKFSASTVLAKVEAVAKKLNFRVTGKKEFVVRMQGAEEGRKGKLAMTVEVFEVAPEVAVVEFSKSAGDTLEYVRFCDEQVRPSLKDIVWSWQGDTNS

SEQ ID NO: 11144 - protein, 261 aa, Guillardia theta
MNVKYINVWKYNVKDIFKEINNLCKDTCLISLDTEFPGIVLKIKSFKYSSENASYHMLRKNVNILKTIQIGLTFDKNCNFKFSTTFQFNFVYDFENNCFAQDSIDLLSKSKLLFETNNKIGINLDLFKEFLTSSSLLCNKKLKWITFHSGYDFGYLINLITNKELPLSKKDFIEHLNFYFPCFFDLKHLGYFSSNFYGSLDKIAEKFNINRIGKSHQAGSDSLITLNIYKIISNDIKPREYFRKFKCVLYNSPSVVHNYYL

SEQ ID NO: 11145 - protein, 509 aa, Agrobacterium tumefaciens str. C58
MDAMTKLDVKQEAAALLDKMGVARDLYTGGDMASFSPVTGEQIASLRTVSVEGVAAVVDKADAAFRTWRNVPAPRRGELIRLLGEELRAFKTDLGRLVSLEAGKIPSEGLGEVQEMIDICDFAVGLSRQLYGLTIATERPGHRMMETWHPLGVVGVISAFNFPVAVWSWNAALALVCGNSVVWKPSEKTPLTALAVQGIFERAAARFGDAPEGLSQLLIGDRAVGEAMVDYPKVPLVSATGSTRMGRDVGPRLAKRFARAILELGGNNAGIVCPSADLDMALRAIAFGAMGTAGQRCTTLRRLFVHDSVYEELVPRLKKAYASVSVGNPLESSALVGPLVDKAAFDGMQKAIEAAKAAGGVVHGGDRVDTGAADAYYVKPALVEMPKQVGPVLEETFAPILYVMKYSDLDQAIDAHNAVAAGLSSSIFTRDIQESERFLSSEGSDCGIANVNIGTSGAEIGGAFGGEKETGGGRESGSDSWKAYMRRATNTINYSKALPLAQGVSFDIE

SEQ ID NO: 11146 - protein, 634 aa, Zea mays
ISPKVSHFGVNPKARWRVRSYKVLLQCNASLPLVGADVSEVDDPLRVAPLVVVPGDDLDHVVAHDHGEGGVDGGGDVGAPEVDGHERHVADLEDARELVGRGVAERLVHLLGEGLLGDLHDEVDDGDVRGGHPERDPVELALKVGEHQRDGLGGTGGRQETDERLFYKLLIDNVVELLPFVYTPTVGEACQKYGSIFGRPQGLYVSLKDKGKVLEVLRNWPHRNIQVICVTDGERILGLGDLGCQGMGIPVGKLALYTALGGVDPSVCLPITIDVGTNNEKLLNDEFYIGLRQKRATGEEYDELIEEFMSAVKQFYGEKVLIQFEDFANHNAFDLLEKYSKSHLVFNDDIQGTASVVLAGLLAALKMVGGTLAEQTYLFLGAGEAGTGIAELIALEISKQTNAPIEECRKKVWLVDSKGLIVDSRKGSLQPFKKPWAHEHEPLKTLYDAVQSIKPTVLIGTSGVGRTFTKEIIEAMSSFNERPIIFSLSNPTSHSECTAEQAYTWSQGRSIFASGSPFAPVEYEGKTFVPGQSNNAYIFPGLGLGLVISGAVRVHEDMLLAASKALADQATQDNFEKGSIFPPFTSIRKISAHIAAAVAAKAYELGLATRLPPPSDLVKYAENCMYTPVYRNYR

SEQ ID NO: 11147 - protein, 333 aa, Deinococcus radiodurans
  misc_feature (309)..(309): Xaa can be any naturally occurring amino acid
MAKYRICLIEGDGIGHEVIPAAKRVLEAAGFDAEYVHAEAGYEYFLDHGTSVPEATYDAVENTDATLFGAATSPSGEKPAGFFGAIRHLRQKYNLYANVRPTKTRPVPHSYENVDLVIVRENTQGLYVEQERRYGDTAIADTVITREASDRIGKFAADLAMKRSKRLTVVHKSNVLPVTQGLFMNTILDHTKTVEGLSTSTMIVDNAAMQLVRNPQQFDVMVMTNMFGDILSDLAAGLVGGLGIAASGNVGDQFGIFESVHGSAPDIAGQGISNPTATILAAVIMLDHLGDHETARRLDNAINKVLAEXPRTRDLGGTAGTQEFTEAVIKALA

SEQ ID NO: 11148 - protein, 175 aa, Triticum aestivum
MAPTVMASSATSVAPFQGLKSTAGLPVSRRSNGASLGSVSNGGRIRCMQVWPIEGIKKFETLSYLPPLSTEALLKQVDYLIRSKWVPCLEFSKVGFIFREHNASPGYYDGRYWTMWKLPMFGCPDATQVINEVEEVKKEYPDAYVRIIGFDNMRQVQWVSFIAFKPPGCEESGKA

SEQ ID NO: 11149 - protein, 402 aa, Zea mays
TGRDEAAWDMDDVAGCFEYFTDQAEALDKRQNSPVSLPMETFKCHLRREPIGVVGLITPWNYPLLMATWKVAPALAAGCAAVLKPSELASVTCLELADICKEVGLPPGVLNIVTGLGPDAGAPLSAHPDVDKVAFTGSFETGKKIMAAAAPMVKPVTLELGGKSPIVVFDDVDIDKAVEWTLFGCFWTNGQICSATSRLLVHTKIAKEFNEKMVAWAKNIKVSDPLEEGCRLGPVVSEGQYEKIKKFILNAKSEGATILTGGVRPAHLEKGFFIEPTIITDITTSMEIWREEVFGPVLCVKEFSPEDEAIELANDTQYGLAGAVISGDRERCQRLSEEIDAGIIWVNCSQPCFCQAPWGGNKRSGFGRELGEGGIDNYLSVKQVTEYISDEPWGWYRSPSKL

SEQ ID NO: 11150 - protein, 427 aa, Zea mays
  misc_feature (265)..(265): Xaa can be any naturally occurring amino acid
  misc_feature (270)..(270): Xaa can be any naturally occurring amino acid
RCRCCAQQERGRIMSKLADLVEQHTEELAALDGADAGKLLLLGKIIDIPAATQMLRYYAGAADKIHGDVLRVSGRYQGYTLKEPIGVVGVIIPWNFPTMMFFLKVSPALAAGCTVVVKPAEQTPLSALYYAHLAKMAGVPDGVINVVPGFGPTAGAALASHMDVDSVAFTGSTEVGRLIMESAARSNLKMVSLELGGKSPLIIFDDADVDMAVNLSRLAVFFNKGEVCVAGSRVYVQEGIYDEFVKKAVEAARSWKVGDPERIIXSVGRXVDKDQFERVLKYIEHGKSEGATLLTGGKPAADKGYYIEPTIFVDVTEDMKIAQEEIFGPVMSLMKFKTVDEVIEKANCTRYGLAAGIVTKSLDVANRVSRSVRAGTVWVNCYFAFDPDAPFGGYKMSGFGRDQGLAAMDKYLQVKSVITALPDSPWY

SEQ ID NO: 11151 - protein, 371 aa, Methanocaldococcus jannaschii
  misc_feature (45)..(45): Xaa can be any naturally occurring amino acid
MFISYWLLQNVFERHYIKKFLVLSMMKVCVIEGDGIGKEVIPEAXKILNELGEFEIIKGEAGLECLKKYGNALPEDTIEKAKEADIILFGAITSPKPGEVQNYKSPIITLRKMFHLYANVRPINNFGIGQLIGKIADYEFLNAKNIDIVIIRENTEDLYVGRERLENDTAIAERVITRKGSERIIRFAFEYAIKNNRKKVSCIHKANVLRITDGLFLEVFNEIKKHYNIEADDYLVDSTAMNLIKHPEKFDVIVTTNMFGDILSDEASALIGGLGLAPSANIGDDKALFEPVHGSAPDIAGKGIANPMASILSIAMLFDYIGEKEKGDLIREAVKYCLINKKVTPDLGGDLKTKDVGDEILNYIRKKLKGY

SEQ ID NO: 11152 - protein, 337 aa, Methanocaldococcus jannaschii
MVISMHKICVIEGDGIGKEVVPATIQVLEATGLPFEFVYAEAGDEVYKRTGKALPEETIETALDCDAVLFGAAGETAADVIVKLRHILDTYANIRPVKAYKGVKCLRPDIDYVIVRENTEGLYKGIEAEIDEGITIATRVITEKACERIFRFAFNLARERKKMGKEGKVTCAHKANVLKLTDGLFKKIFYKVAEEYDDIKAEDYYIDAMNMYIITKPQVFDVVVTSNLFGDILSDGAAGTVGGLGLAPSANIGDEHGLFEPVHGSAPDIAGKKIANPTATILSAVLMLRYLGEYEAADKVEKALEEVLALGLTTPDLGGNLNTFEMAEEVAKRVREE

SEQ ID NO: 11153 - protein, 154 aa, Zea mays
GRVGKFGSSFRFGLEAGSKPEILLAMSCLCKGSPDAFLVCNGFKDAEYISLALLGRKLALNTVIVLEQEEELDLVIELSQKMNVRPVIGLRAKLRTKHSGHFGSTSGEKGKFGLTTTQIVRVVRKLRQSGMLDCLQLLHFHIGSQIPSTSLLSD

SEQ ID NO: 11154 - protein, 336 aa, Mycobacterium avium subsp. paratuberculosis str. k10
MKLAVIGGDGIGPEVTAEALKVLDAVLPGVDKTEYDLGARRYHATGELLPDSVIDELRAHDAILLGAIGDPSVPSGVLERGLLLRLRFELDHHINLRPGRLYPGVSSPLAGNPDIDFVVVREGTEGPYTGTGGAIRVGTPNEVATEVSQNTAFGVRRVVVDAFERARRRRKHLTLVHKTNVLTFAGKLWSRIVAEVGRDYPDVEVAYQHIDAATIFMVTDPGRFDVIVTDNLFGDIITDLSAAVCGGIGLAASGNIDGTRTNPSMFEPVHGSAPDIAGQGIADPTAAIMSVALLLAHLGEDAAATRVDRAVERYLATRGNERPATTEVGERIAAAL

SEQ ID NO: 11155 - protein, 314 aa, Pseudomonas resinovorans
MPSLSLRIERIDPLTPRIRRLILVADAQQPLPGFTPGAHIEIQIAGSKPQWRAYSLVNLPGHAHYEIAVQLEEQSSGGSRWIHQLQVGQPLQVRAPKNHFPLVTQASDYLLIAGGIGITPMLGMARALAAGQQPFTLHYAGREAQGMAYLEEVRALGSAHCWISGGDPARRLPLASLLATPHNGRQLYVCGPKALIASVLHSARELGWDDSHVHSELFTGSLDAAGDASFEVELRSSGITLQVPAGKSVLEAMLDADLDPLFDCRRGDCGVCVAQVLEGSAEHRDICLSARERSDGRFCTCVSRASSARLVLDL

SEQ ID NO: 11156 - protein, 425 aa, Bacillus cereus ATCC 10987
MKNERIEKLQESWELDTRWKGITRPYSAEDVIRLRGSIDIEHTLARRGAEKLWASLHTEDYINALGALTGNQAMQQVKAGLKAIYLSGWQVAADANLSGHMYPDQSLYPANSVPAVVKRINQTLQRADQIQHMEGSGDTDYFVPIVADAEAGFGGQLNVFELMKGMIEAGASGVHFEDQLSSEKKCGHLGGKVLLPTQTAVRNLISARLAADVMGVPTIIVARTDADAADLITSDIDPVDKAFITGERTPEGFYRTKAGLDQAIARGLAYAPYADLVWCETSEPNLEDAKRFAEAIHKEHPGKLLAYNCSPSFNWKQKLDEKTIASFQKEIASYGYKFQFVTLAGFHSLNYGMFELARGYKERGMAAYSELQQAEFAAEKHGYSATRHQREVGTGYFDEVAQVITGGTSSTTALKGSTEEAQFTK

SEQ ID NO: 11157 - protein, 177 aa, Cicer arietinum
LDIAVRLLEPLKEQFPIISYADFYQLGGVVAVEVTGGPEVPFHPGREDKPEPPPEGRLPDATKGSDHLRDVFGKAMGLSDQDIVALSGGHTIGAAHKERSGFEGPWTSNPLIFDNSYFTELLNGEKEGLLKLPSDKALLSDPVFRPLVEKYAADEDAFFADYAEAHLKLSELGFAEA

SEQ ID NO: 11158 - protein, 141 aa, Arabidopsis thaliana
MADTPSSPAGDGGESGGSVREQDRYLPIANISRIMKKALPPNGKIGKDAKDTVQECVSEFISFITSEASDKCQKEKRKTVNGDDLLWAMATLGFEDYLEPLKIYLARYRELEGDNKGSGKSGDGSNRDAGGGVSGEEMPSW

SEQ ID NO: 11159 - protein, 316 aa, Escherichia coli
TDKLTSLRQYTTVVADTGDIAAMKLYQPQDATTNPSLILNAAQIPEYRKLIDDAVAWAKQQSNDRAQQIVDATDKLAVNIGLEILKLVPGRISTEVDARLSYDTEASIAKAKRLIKLYNDAGISNDRILIKLASTWQGIRAAEQLEKEGINCNLTLLFSFAQARACAEAGVFLIAPFVGRILDWYKANTDKKEYAPAEDPGVVSVSEIYQYYKEHGYETVVMGASFRNIGEILELAGCDRLTIAPALLKELAESEGAIERKLSYTGEVKARPARITESEFLWQHNQDPMAVDKLAEGIRKFAIDQEKLEKMIGDLL

SEQ ID NO: 11160 - protein, 411 aa, Haemophilus influenzae 86-028NP
  misc_feature (27)..(27): Xaa can be any naturally occurring amino acid
MSDPVILPLGIAAFTVIVLVLVAIILXAKSKLVDSGDITIDINDDPEKAITLPAGGKLLGALASKGIFVSSACGGGGSCGQCIVKVKNGGGEILPTELSHINKREAKEGYRLACQVNVKGNMEVELPEEIFGVKKWECTVISNDNKATFIKELKLAIPEGEEVPFRAGGYIQIEAEPHVVNYKDFDIPEEYHEDWDKYDLWRYVSKVDEHIIRAYSMASYPEEKGIIMLNVRIATPPPRQPDAPPGQMSSYIWSLKAGDKVTISGPFGEFFAKETNAEMVFIGGGAGMAPMRSHIFDQLKRLHSKRKMSFWYGARSKREIFYQEDFDQLQAENPNFVWHVALSDALPEDNWTGYTGFIHNVLYENYLKNHEAPEDCEYYMCGPPVMNAAVIKMLKDLGVEDENILLDDFGG

SEQ ID NO: 11161 - protein, 170 aa, Zea mays
MAPTVMMASSATAVAPFQGLKSTASLPVARRSSRSLGNVSNGGRIRCMQVWPAYGNKKFETLSYLPPLSTDDLLKQVDYLLRNGWIPCLEFSKVGFVYRENSTSPCYYDGRYWTMWKLPMFGCNDATQVYKELQEAIKSYPDAFHRVIGFDNIKQTQCVSFIAYKPPGSD

SEQ ID NO: 11162 - protein, 353 aa, Nicotiana tabacum
MEVISTNTNGSTIFKSGAIPMNGHHNGTSKHQNGHKNGTSEQQNGTISLDNGNELLGNSNCIKPGWFSEFSALWPGEAFSLKVEKLLFQGKSDYQDVMLFESATYGKVLTLDGAIQHTENGGFPYTEMIVHLPLGSIPNPKKVLIIGGGIGFTLFEMLRYPTIEKIDIVEIDDVVVDVSRKFFPYLAANFNDPRVTLVLGDGAAFVKAAQAEYYDAIIVDSSDPIGPAKDLFERPFFEAVAKALRPGGVVCTQAESIWLHMHIIKQIIANCRQVFKGSVNYAWTTVPTYPTGVIGYMLCSTEGPEIDFKNPVNPIDKETAQVKSKLAPLKFYNSDIHKAAFILPSFARSMIES

SEQ ID NO: 11163 - protein, 158 aa, Brassica rapa subsp. pekinensis
TMGISVKEFPWIKGFNFDVPHVVQVAQVLDGVENVGGDMFDSVPKCDAVLIKWVLHDWGDRDCIRILKNCKEAVPPNIGKVLIVESVIREKKKAMIVEDRDEKLEHVRLMLDMVMMAHTTTGKERTLKEWDFVLNEAGFARYEVRDIDDVQCVIIAYR

SEQ ID NO: 11164 - protein, 375 aa, Nicotiana tabacum
MEVISTNTNGSTIFKNGAIPMNGHQNGTSEHLNGYQNGTSKHQNGHQNGTFEHRNGHQNGTSEQQNGTISHDNGNELLGSSDSIKPGWFSEFSALWPGEAFSLKVEKLLFQGKSDYQDVMLFESATYGKVLTLDGAIQHTENGGFPYTEMIVHLPLGSIPNPKKVLIIGGGIGFTLFEMLRYPSIEKIDIVEIDDVVVDVSRKFFPYLAANFNDPRVTLVLGDGAAFVKAAQAGYYDAIIVDSSDPIGPAKDLFERPFFEAVAKALRPGGVVCTQAESIWLHMHIIKQIIANCRQVFKGSVNYAWTTVPTYPTGVIGYMLCSTEGPEVDFKNPVNPIDKETTQVKSKLGPLKFYNSDIHKAAFILPSFARSMIES

SEQ ID NO: 11165 - protein, 178 aa, Glycine max
MASSMISSPAVTTVNRAGAGMVAPFTGLKSMAGLPTRKTNNDITSIASNGGRVQCMQVWPPVGKKKFETLSYLPDLDDAQLAKEVEYLLRKGWIPCLEFELEHGFVYREHNRSLGYYDGRYWTMWKLPMFGCTDASQVLKELQEAKTAYPNGFIRIIGFDNVRQVQCISFIAYKPPSF

SEQ ID NO: 11166 - protein, 536 aa, Zea mays
MGNCCRSPAAVAREDVSSSHFPASNAKKKPHQARNGGGAGQKRLSVLGDEGCEVVGIDDKYVLDRELGRGEFGVTYLCMDRGTKELLACKSISKRKLRTAVDVEDVRREVAIMRHLPKSPSVVSLREACEDDGAVHLVMELCEGGELFDRIVARGHYTERAAASVTRTILEVVQLCHRHGVIHRDLKPENFLFANKKENSPLKAIDFGLSIFFKPGEKFSEIVGSPYYMAPEVLKRNYGPEIDIWSAGVILYILLCGVPPFWAETEQGVAQAILRGNIDFKREPWPNVSENAKDLVRHMLEPDPKLRLTAKQVLEHHWLQNAKKAPNVPLGDIVKSRLKQFSRMNRFKRRALRVIADHLSAEEVEDIKDMFKTMDTDNDGIVSYEELKTGIAKLGSHLAESEVQMLIEAVDTNGRGALDYGEFLAVSLHLQRMANDEHLRRAFLFFDKDGNGFIEPEELREALVDDGAADSMEEVVNDILQEVDTDKDGKISYEEFVAMMKTGTDWRKASRHYSRGRFNSLSMKLIKDGSVKLGVE

SEQ ID NO: 11167 - protein, 161 aa, Pseudomonas aeruginosa PAO1
MSDSLLSIPCTTIKGEQKTLADFGGKALLVVNTASKCGFTPQYQGLEALWEKYRERGLVVLGFPCNQFGKQEPGDEGEISQFCELNYGVSFPLFRKIEVNGAGAHPLFVSLKKRAPGLLGSQGIKWNFTKFLIGRDGQVVKRYAPTTKPEELSSAIEALLE

SEQ ID NO: 11168 - protein, 112 aa, uncultured Bartonella sp.
ANEACLKMLQEIGSVERIPEFIARAKDKNDSFRLMGFGHRVYKNYDPRAKIMQQTCHEVLKELNIQNDPLLDIAITLENIALNDEYFIEKKLYPNVDFYSGITLKALGFPTE

SEQ ID NO: 11169 - protein, 159 aa, Triticum aestivum
  misc_feature (10)..(10): Xaa can be any naturally occurring amino acid
  misc_feature (43)..(43): Xaa can be any naturally occurring amino acid
  misc_feature (51)..(51): Xaa can be any naturally occurring amino acid
  misc_feature (66)..(66): Xaa can be any naturally occurring amino acid
  misc_feature (84)..(84): Xaa can be any naturally occurring amino acid
  misc_feature (90)..(90): Xaa can be any naturally occurring amino acid
  misc_feature (99)..(99): Xaa can be any naturally occurring amino acid
  misc_feature (112)..(112): Xaa can be any naturally occurring amino acid
  misc_feature (122)..(122): Xaa can be any naturally occurring amino acid
  misc_feature (129)..(129): Xaa can be any naturally occurring amino acid
  misc_feature (136)..(136): Xaa can be any naturally occurring amino acid
  misc_feature (153)..(153): Xaa can be any naturally occurring amino acid
  misc_feature (155)..(155): Xaa can be any naturally occurring amino acid
MSDSEEHHFXSKADAGASKTYPQQAGTVRKNGFIVIKNRPCKXVEVSTSKXLGKHGHAKCHFVAIXHIPMGKKLEDIVPSSHNXDIPACXPLLNYQLIXIFPEDGFVTLLTXDGNTKDDLRXPTDEILXAQIKEGXKTGRSVVTSICMGEDKXAXEGFQ

SEQ ID NO: 11170 - protein, 202 aa, Arabidopsis thaliana
MTETHRTTTTFLDLLRRQMSGHDLTRRKRTLKERLRFKCIGCCGPTWNLRLTNNTTLHSPTSRDDEIEELQIETGLVLESDHGSGTGMNLATALEAERYNRGESTEAEADMTPRRVSLMRLLEETAEKIVDDDGKETEILTASIGTLTGNDSVCCVCMGRKKGAAFIPCGHTFCRVCSRELWLNRGSCPLCNRPIIEILDIF

SEQ ID NO: 11171 - protein, 322 aa, Neurospora crassa
MNSATSNFEVDATGVSPKQIHNLIPSLKLSDGNEIPMLGYGLGTANYKSGDSADTISEPIVNATLTALNAGYAHLDGAEVYGNEVELGRAIAQSKLPRSSLYITTKTIVRAGDTVTQSFNRSLEKLGLDYVDLYLLHSPFFAKNPEQLQAAWREMEKIKDSGMAKSIGVSNFLISHLQTLFDIPGGLQYPPVVNQIEYHPYLQHVVEGEDLVAFCREKHIAIAAYSPLTAITKARPGPVDPIYTQLAKKYGVSEAEIAFRWCLDQGIVTLTTSSNEERLKGYLKKLPSFKLTPKEVEDIASAGKEKHYRVWWTEEFAGDDRH

SEQ ID NO: 11172 - protein, 344 aa, Mesorhizobium sp. BNC1
MTNMMKALVKAKPEEGLWMERVPLPEIGPNDVLIKVRKAAICGTDVHIWNWDEWARKTVPVPLVTGHEFVGEVVDVGSAVTEYRIGQRVSGEGHIVCGHCRNCRAGRGHLCRNTLGVGVHRPGAFAEYISLPQHNVVAIPDDVPDEIAAIFDPLGNAVHTALSFDLVGEDVLVTGAGPIGIMGALVAQCVGARKVVITDINPGRLALAKKLGVRHVVNAREEKLTDVMRKLGMTEGFDVGLEMSGSASAFRDMIDVMNNGGKIAILGIAPTGFEIDWNKVIFKMLHLKGIYGREMFETWYKMIALVQGPLDISGLITHRISADDYREGFAAMRSGEAGKVVMDW

SEQ ID NO: 11173 - protein, 434 aa, Agrobacterium tumefaciens str. C58
MGERSMTDFYKLVPGAPKGRFDGIERTYTAADVARLRGSVEIRHSLAEMGANRLWKLINEENFVNALGALSGNQAMQMVRAGLKAIYLSGWQVAADANTASAMYPDQSLYPANAAPELAKRINRTLQRADQIETAEGKGLSVDTWFAPIVADAEAGFGGPLNAFEIMKAFIEAGAAGVHYEDQLASEKKCGHLGGKVLIPTAAHIRNLTAARLAADVMGVPTLVIARTDAEAAKLLTSDIDERDQPFVDYDAGRTVEGFYQVKNGLEPCIARAVAYAPYCDLIWCETSKPDLEQARRFAEGVHKVHPGKKLAYNCSPSFNWKKNLDDATIAKFQRELGAMGYKFQFITLAGFHQLNFGMFELARGYKDRQMAAYSELQEAEFAAEVNGYTATKHQREVGTGYFDAVSLAISGGTSSTTAMKESTEHDQFRPAAE

SEQ ID NO: 11174 - protein, 133 aa, Neurospora crassa
MNAPDRFELFLLQDGEKKIEEKVFTGMSNTSDFKILKEDHTLGNLLAEHLKQAPHVLMAGYKIAHPNVPELFIRIQTDGSITPREALVGACKQLVAMYGQLGREFQKELALRQYADQGEQGGGVNGGANGGHY

SEQ ID NO: 11175 - protein, 240 aa, Triticum aestivum
MGGGVMRTAAAAPLLSAAGEIPPVAPAGSQWASWEVDDWEFADWRSESASEADVAVVGGPRLVFAPPSREEAEEATAELREAIDRVYFKETPVEVVKEHDQELSKLGADALIPAMPGHVVQAFTLLKSSPEAQSVVASLASDKNVWDAVLKNERVMEFYKSHQQTLVNTFPEGTDSTDSVESPEKFEEASPEYALPTASPLSDFVDNAKKTMMEMVDNITNFFQRLFHNPAKLKPDRVIL

SEQ ID NO: 11176 - protein, 237 aa, Arabidopsis thaliana
MEGVGARLGRSSTRYGPATVFTGPVRKWKKKWVHVSPSSKKDNNNSSSGSAAAAASVVNGGSNSDGSNGSHLLLYKWAPLSQNGNGNEDGKSESNSPSEDTVATVAEDPPRRRFKYVPIAVLEEQKKEITEIEEDDKIEEDDKIDEDNKVEQEDKVDEDKTVEESSEKKAEVEVEEKPDINDVPMEDIQVEEKIVQDDEEKVVRQDLNESTVDLGLNLNANDADAENDPKEDKPLEE

SEQ ID NO: 11177 - protein, 129 aa, Brassica napus
  misc_feature (87)..(87): Xaa can be any naturally occurring amino acid
  misc_feature (104)..(104): Xaa can be any naturally occurring amino acid
MIREIPSLQNDNVSIQDHTSSNIKNRNTMDMRRDNRQDMTFRGPTQDQMMSKQEYLQTLSSQNSTRRLITKSSYFSLESMVVLVGLXASLLFLPLILPPLPPPXPFMLLLVPIGIMVLLMVLALMPSSN

SEQ ID NO: 11178 - protein, 202 aa, Cicer arietinum
MNPEYDYLFKLLLIGDSGVGKSCLLLRFADDSYLDSYISTIGVDFKIRTVEQDGKTIKLQIWDTAGQERFRTITSSYYRGAHGIIVVYDVTDQESFNNVKQWLNEIDRYASENVNKLLVGNKCDLAANKVVSSETAKAFADEIGIPFMETSAKNATNVEQAFMAMAAEIKNRMASQPANNARPPTVQIRGQPMNQKSGCCST

SEQ ID NO: 11179 - protein, 280 aa, Pyrococcus horikoshii OT3
MRDMEFIEWYPRGYGVAFKVKRKILEEQSEYQKIEVYETEGFGKLLAIDGTVQLVTEGEKSYHEPLVHPAMLAHPNPRRVLIIGGGDGGAIREVLKHEEVEEVIMVEIDKKVIEISAKYIGIDGGILEKMLSDKHEKGKLIIGDGVKFIEENSGFDVIIVDSTDPVGPAEMLFSEEFYKNAYRALNDPGIYVTQAGSVYLFTDEFLTAYRKMRKVFDKVYYYSFPVIGYASPWAFLVGVKGSIDFMKVDAEKGKKLGLEYYDPDKHETLFQMPRYIVQML

SEQ ID NO: 11180 - protein, 197 aa, Cicer arietinum
MSGSRFIKCVTVGDGAVGKTCLLISYTSNTFPTDYVPTVFDNFSANVVVDGSTINLGLWDTAGQEDYNRLRPLSYRGADVFLLAFSLISRASYENIAKKWIPELRHYAPGVPIILVGTKLDLRDDKQFFQDHPGAVPITTAQGEELRKLIGAPVYIECSSKTQKNVKAVFDAAIKVVLQPPKQKKTKRKGQKACSIL

SEQ ID NO: 11181 - protein, 343 aa, Mycobacterium avium subsp. paratuberculosis str. k10
MRIGVLTGGGDCPGLNAVIRAVVRTCDSRYGSSVVGFQDGWRGLLENRRIQLHNDDRNDRLLAKGGTMLGTARVHPDKLRAGLNQIKQTLDDNGIDVLIPIGGEGTLTAAHWLSEENVPVVGVPKTIDNDIDCTDVTFGHDTALTVATDAIDRLHSTAESHQRVMLVEVMGRHAGWIALNAGLASGAHMTLIPEQPFDVEEVCRLVKRRFQRGDSHFICVVAEGAKPIPGSISLREGGIDEFGHERFTGVAAQLGAEVEKRINKEVRVTVLGHVQRGGTPTAYDRVLATRFGVNAADAAHAGEYGQMVSLRGQDIGRVPLADAVRQLKLVPESRYDDAAAFFG

SEQ ID NO: 11182 - protein, 381 aa, Nicotiana tabacum
MEVISTNTNGSTIFKNGAIPMNGYQNGTSKHQNGHQNGTSEHRNGHQNGISEHQNGHQNGTSEHQNGHQNGTISHDNGNELQLLGSSNSIKPGWFSEFSALWPGEAFSLKVEKLLFQGKSDYQDVMLFESATYGKVLTLDGAIQHTENGGFPYTEMIVHLPLGSIPNPKKVLIIGGGIGFTLFEMLRYPTIEKIDIVEIDDVVVDVSRKFFPYLAANFSDPRVTLVLGDGAAFVKAAQAGYYDAIIVDSSDPIGPAKDLFERPFFEAVAKALRPGGVVCTQAESIWLHMHIIKQIIANCRQVFKGSVNYAWTTVPTYPTGVIGYMLCSTEGPEVDFKNPVNPIDKETTQVKSKLAPLKFYNSDIHKAAFILPSFARSMIES

SEQ ID NO: 11183 - protein, 446 aa, Corynebacterium diphtheriae NCTC 13129
MARSVVVWFRDDLRVHDNPALMKAWELVRANPADLHAVYIANEVGVRPLGGAVKWWLHHSLLALSEQLAQRGVRLHVLSGDPLTLLPQLVTSCGATAVTMNRRYDPAARSIDDAFVADASAHDVEVYDFPCHLLAEPGEITTTTGGSYKVFTPFSRNLRDAIGDLPLDTLAAPPKAEQPIDDTETQAAIADLGWDAWWAASISKAWTPGEPAAREALAELDDILPRYLDDRDRPDIDGTSRLSPRLRFGELSVAEVWNHAHTSEGFRRQLMWRDFAWHRLDAHPDMATANIRPEFDHFPWDGGDFEAELNAWRHGRTGIALVDAGMRELWATGTMHNRVRMVAASLLVKNLGIHWRHGEQWFWDTLVDADPASNPFNWQWVAGSGDDAAPYFRIFNPDTQARRFDPDGTYRTRWLPIMSADYPEEAIVDLKESRLRALDAYNACKR

SEQ ID NO: 11184 - protein, 419 aa, Nicotiana tabacum
MEVISTNTNGSTIFKNGAIPMNGHQSGTSKHLNGYQNGTSKHQNGHHNGTSEHRNGHQNGISEHQNGHQNGTSEHRNGHQNGISEHQNGHQNGTSEHQNGHQNGTSEQQNGTISHDNGNELLGNSNSIKLGWFSEFSALWPGEAFSLKVEKLLFQGKSDYQDVMLFESATYGKVLTLDGAIQHTENGGFPYTEMIVHLPLGSIPNPKKVLIIGGGIGFTLFEMLRYPTIEKIDIVEIDDVVVDVSRKSFPYLAANFNDPRVTLVLGDGAAFVKAAQAGYYDAIIVDSSDPIGPAKDLFERPFFEAVAKALRPGGVVCTQAESIWLHMHIIKQIIANCRQVFKGSVNYAWTTVPTYPTGVIGYMLCSTEGPEVDFKNPINPIDKETTQVKSKLAPLKFYNSDIHKAAFILPSFARSMIES

SEQ ID NO: 11185 - protein, 431 aa, Leptospira interrogans serovar Copenhageni str. Fiocruz L1-130
METKIQNFGECSIPSPADYEYYTSDTSRLIFRTVFQSKEDWNSYVQEGPDFFEQAGPREKIYFNPQEVTAGIVTCGGLCPGINDVIRGIVMELYYRYGVSRILGFPYGYQGLVKRYSHQPIELTPEKVAHIVDEGGSMLSSSRGNQSPEEMVDSLSFYGVKILFCIGGDGTLRGARTIVDEIAKRKEKISVVGIPKTIDNDINYVQKTFGFSTAFSKAMEAVECAHVEAKGAPNGIGLVKLMGRHSGFIAVNAALASRNVNYCLIPEVDFDLFGNEAFLDDLKKRIQKKGHAVIIVAEGAGQKFFDSTEERDSSGNLKLKDIGLFLKDTMTEFFKKENIPVNIKYIDPSYIIRSIPANAEDSVFCGFLAQNAVHAGMAGKTDMVVGMWNNVFTHLPISVAIQERKVLQPDRSTLWRSLLASTGQPAHMLAK

SEQ ID NO: 11186 - protein, 490 aa, Erwinia carotovora subsp. atroseptica SCRI1043
MSRYGLQQLYINGAYVDSTGNDTFDAVNPANGDIIACIQSATAADVDRAVSAATAGQKVWAAMTAMERSRILRRAVDILRERNDELALLETHDTGKPLSETRTVDIVTGADVLEYYAGLIPMLEGQQIPLRDTSFVYTRREPLGVVAGIGAWNYPIQIALWKSAPALAAGNAMIFKPSEVTSLTALKLAEIYTEAGLPAGVFNVLTGTGKSVGQALTTHPGIAKVSFTGGIASGKTVMANAAGSTLKDVTMELGGKSPLIIFDDADLDKAADIAMMANFFSSGQVCTNGTRVFVPKALQAQFEEKILACVQRIRAGDPTDESVNFGPLVSFPHRESVLRYIESGKREGARVLVGGEPMTDGDYAQGAYVAPTVFTDCRDDMKIVRKEIFGPVMSILTYQDEDEVIRRANDSEYGLAAGIVTRDLNRAHRVIHQLEAGICWINTWGESPAEMPVGGYKHSGVGRENGVTTLEHYTQIKSIQVELGEFRSVF

SEQ ID NO: 11187 - protein, 473 aa, Populus tremula x Populus tremuloides
MSNQKHGEEAMVSSFNDTEHEEKEEVSKDESGFRLKSLLWHGGSVYDAWFSCASNQVAQVLLTLPYSFSQMGMLSGIILQIFYGFLGSWTAYLISVLYVEYRSRKEKENVNFKNHVIQWFEVLDGLLGPTWKAVGLAFNCTFLLFGSVIQLIACASNIYYIDDKFDKRTWTYIFGACCATTVFIPSFHNYRIWSFLGLGMTTYTAWYMTIASLVHGQVDGVTHSGPAKAVLYFTGATNILYTFGGHAVTVEIMHAMWKPQRFKYIYLLATLYVFTLTLPSAAATYWAFGDQLLTHSNAFSLLPRTGWRDAAVILMLIHQFITFGFACTPLYFVWEKVIGMHDTKSILLRALCRLPVVIPIWFFAIIFPFFGPINSAVGALLVTFTVYIIPALAHMLTYRSASARQNAVEKPPVFLPSWTAMYVLNAFIVVWVLVVGFGLGGWASMSNFIKQVDTFGLFAKCCQCPRSAAAKHH

SEQ ID NO: 11188 - protein, 79 aa, Glycine max
  misc_feature (72)..(72): Xaa can be any naturally occurring amino acid
MATAMIAWAAVTTADRADPRMHAPFTGLKSMAGFTTRKTNHDISSIATNAVRVLCMHEWTPVLMKKYETLYXLPDLDDP

SEQ ID NO: 11189 - protein, 292 aa, Zea mays
MASSSRSTVFSLLLLVALLLSCSGMSSAARLLEEAPPKEEHPHPAVPELPEPELPPHPTDVVPPELPKPELPPHPAVVPELPKPEVPHPVPEQPKPELTPHPAAVPELPKPEVPHPTAVPELPKPEVPHPVPELPKPEVPPHPTAVPELPKPEVPHPVPELPKPELTPHPAAVPELPKPEVPHPVPELPKPEVPPHPTAVPELPKPEVPHPVPELPKPELPPHPVVPELPKPEVPHPVALELPKPELPPHPTVPKLPHPEVPEVPNHELPPLPKAELPPKPEGHYPEPEAKP

SEQ ID NO: 11190 - protein, 479 aa, Rubrivivax gelatinosus PM1
MVTEYRNYIDGEFLANRSGALIDVHNPATHELLARVPDAPNDVVDLAVQAARTAQPGWAKLPAIQRAQHLRAIAARLRENVEELAHTITAEQGKVLGLARVEVNFTADYMDYMAEWARRLEGEVLTSDRVGESIFLMRKPIGVAAGILPWNFPFFLIARKLAPALITGNTIVIKPSEITPINAFEFARLASQTDLPRGVFNLVGGTGAGAGAQLTSHRDVGIVSFTGSVETGTRIMTAASKNLTRVNLELGGKAPAIVLADADLDLAVKAIYDSRVINTGQVCNCAERVYVQRKVADEFTSKIAARMAGTLYGDPLAQPDVAMGPLVSQAGLDKVAGMVDRARAAGASIVQGGRKANRDKGYHYEPTVIANCSADMEIMRKEIFGPVLPIQVVDELDEAIALANDSDYGLTSSIFTKDLNSAMRAVRDLQFGETYVNREHFEAMQGFHAGRKKSGIGGADGKHGLYEFTETHVVYIQHG

SEQ ID NO: 11191 - protein, 120 aa, Aerides japonica
MARSTASMAVVCIVSFLLVSGVFREASGTITCGQVVSTLTPCISYIRGDSTLPQTCCSGVKKLNALASTSPDRQGACSCLKNLASHIPNLNPARAAGLPGNCGVSVPYPISTSTDCSKVR

SEQ ID NO: 11192 - protein, 399 aa, Bacillus cereus G9241
MLENQINERSLLLHKELVGKIEITSKVEVNSADDLSLTYTPGVAESCKAIAADEETVYDYTARGNMVAVVSDGTAVLGLGNIGPKAAMPVMEGKSILFKKFANVDAFPLCLGTTDVDEIVTLVKNLEPTFAGINLEDIAAPRCFEIEKRLKEETSIPVFHDDQHGTAIVVLAAVINALKVVSKQMDHVKIVINGAGSAGIAIGKLLLKAGAKHITLVSLEGIVCEGEAWMNEAQIEVSKKTNREHVRGTLKEAIHQADIFIGVSAPNVLTKELVKTMNEKAIVFAMANPIPEIFPEDALEAGAAVVGTGRSDYANQVNNVLAFPGIFRGALDVRATDITEEMKLAAAYGIANIITDEERNANYVIPNPLDKRVVPSVAEAVAKAAIDSGVAQITKIPSY

SEQ ID NO: 11193 - protein, 497 aa, Emericella nidulans
MSDLFTTIETPVIKYEQPLGLFINNEFVKGVEGKTFQVINPSNEKVITSVHEATEKDVDVAVAAARAAFEGPWRQVTPSERGILINKLADLMERDIDTLAAIESLDNGKAFTMAKVDLANSIGCLRYYAGWADKIHGQTIDTNPETLTYTRHEPVGVCGQIIPWNFPLLMWSWKIGPAVAAGNTVVLKTAEQTPLSALYAAKLIKEAGFPAGVINVISGFGRTAGAAISSHMDIDKVAFTGSTLVGRTILQAAAKSNLKKVTLELGGKSPNIVFDDADIDNAISWVNFGIFFNHGQCCCAGSRILVQEGIYDKFVARFKERAQKNKVGNPFEQDTFQGPQVSQLQFDRIMEYINHGKKAGATVATGGDRHGNEGYFIQPTVFTDVTSDMKIAQEEIFGPVVTIQKFKDEAEAIKIGNSTDYGLAAAVHTKNVNTAIRVSNALKAGTVWINNYNMISYQAPFGGFKQSGLGRELGSYALENYTQIKTVHYRLGDALFA

SEQ ID NO: 11194 - protein, 550 aa, Triticum aestivum
  misc_feature (257)..(257): Xaa can be any naturally occurring amino acid
  misc_feature (267)..(267): Xaa can be any naturally occurring amino acid
  misc_feature (297)..(297): Xaa can be any naturally occurring amino acid
  misc_feature (327)..(327): Xaa can be any naturally occurring amino acid
MAAAATRRAASSLASRCLLARPAASPAAVPSALRRADGARGLLPGLLQRFGTAAAAEEPISPSVQVGETQLLINGKFVDAASGKTFPTVDPRTGEVIARVAEGDAEDVDRAVVAARKAFDEGPWPRMTAYERSRILLRFADLIEKHNDDIAALETWDNGKPYEQAAHIEVPMLARLMRYYAGWTDKIHGLIVPADGPHHVQVLHEPCWGLWADHPVELPTFDVRLVTAPGPRNWQLLHEPIGVVGQIIPWNFPLLMXAAELALLLPXDSTMVLTYSRQTPLSAHCVSKLLHEAGLPXGVLNIVSGFRPNSWAALASHMDVDKIAFTXDDADIDQAVELAHFALFFNQGQCCCAGSRTFVHERVYDEFVEKSKARALKRVVGDPFRKGVEQGPQIDDEQFKKILRYIKSGVDSGATLVTGGDKLGDKGYYIQPTIFSDVQDGMKIAQEEIFGPVQSIFKFNDLNEVIKRANASQYGLAAGVFTNNLDTANTLTRALRAGTVWVNCFDIFDAAIPFGGYKMSGIGREKGIDSLKNYLQVKAVVTALKNPAWL

SEQ ID NO: 11195 - protein, 497 aa, Emericella nidulans
MSDLFTTIETPVIKYEQPLGLFINNEFVKGVEGKTFQVINPSNEKVITSVHEATEKDVDVAVAAARAAFEGPWRQVTPSERGILINKLADLMERDIDTLAAIESLDNGKAFTMAKVDLANSIGCLRYYAGWADKIHGQTIDTNPETLTYTRHEPVGVCGQIIPWNFPLLMWSWKIGPAVAAGNTVVLKTAEQTPLSALYAAKLIKEAGFPAGVINVISGFGRTAGAAISSHMDIDKVAFTGSTLVGRTILQAAAKSNLKKVTLELGGKSPNIVFDDADIDNAISWANFGIFFNHGQCCCAGSRILVQEGIYDKFVARFKERAQKNKVGNPFEQDTFQSPQVSQLQFDRIMEYINHGKKAGATVATGGDRHGNEGYFIQPTVFTDVTSDMKIAQEEIFGPVVTIQKFKDEAEAIKIGNSTDYGLAAAVHTKNVNTAIRVSNALKAGTVWINNYNMISYQAPFGGFKQSGLGRELGSYALENYTQIKTVHYRLGDALFA

SEQ ID NO: 11196 - protein, 285 aa, Burkholderia cepacia R1808
MSTTLLFHPTPDAAYGFPNARRLAHVASPHQHIEVWDTPQLGRLFTLDGRPMTSVGDEYVYHECMTHPAALAHPCPKKALVLGGGDGGAARQLLKHACIERIVVAELDDEVVGMARRYLDDVHQGALDDPRVEVVIGDAAQFVASTVEHFDLVVFDLTPPDSPAAGLYTREFYARLKRILTPRAALSMHLGSPLFHAARIAALLDDLRASFAFVDPLSAHVPLYGSQWLMAIASDTLDAAALFAHDVDERLAARRVHGLRYYDARLHAALFALPRALRDTLGGRR

SEQ ID NO: 11197 - protein, 252 aa, Zea mays
FQAGTGIAELIALEISKQTNAPIEECRKKVWLVDSKGLIVDSRKGSLQPFKKPWAHEHEPLKTLYDAVQSIKPTVLIGTSGVGRTFTKEIIEAMSSFNERPIIFSLSNPTSHSECTAEQAYTWSQGRSIFASGSPFAPVEYEGKTFVPGQSNNAYIFPGLGLGLVISGAVRVHEDMLLAASKALADQATQDNFEKGSIFPPFTSIRKISAHIAAAVAAKAYELGLATRLPPPSDLVKYAENCMYTPVYRNYR

SEQ ID NO: 11198 - protein, 491 aa, Pseudomonas putida
MKHYRNYVNGKWTESSRTFDDVSPVDGSLVAIVHEASRELVDEAVKSGHQALSGEWGRTTATQRVALLRRIADEMERRQGDFLAAEMADTGKPHSMASSIDVPRGIANFRTFADILATAPVDSHRLDLADGAYALNYSARKPLGVVGVISPWNLPLLLMTWKVAPALACGNTVVVKPSEDTPGTATLLAEVMEAAGVPPGVFNLVHGFGPNSAGEFISSHPDISAITFTGESRTGTTIMRAAAEGVKPVSFELGGKNAAIIFADCDFDKMLDTMMRALFLNSGQVCLCSERVYVERPLYDRFCAALVERIKGMKIDWPQDPATQMGPLISAKHRDKVLGYFELARTEGATFLAGGGVPHFGDSRDDGAWVQPTVITGLGDDARSVREEIFGPICHVSVFDNEQEVIARANDTRYGLAATIWTSNLGRAHRVSEAMRVGISWVNTWFLRDLRTPFGGAGLSGIGREGGMHSLNFYSELTNVCIRIDEEVADV

SEQ ID NO: 11199 - protein, 182 aa, Triticum aestivum
MSDEAASPPGGGGGGGGGGSDDGGGGGGFGGVREQDRFLPIANISRIMKKAIPANGKIAKDAKETVQECVSEFISFITSEASDKCQREKRKTINGDDLLWAMATLGFEEYIEPLKVYLQKYRETEGDSKLAGKSGDVSVKKDALGPHGGASGTSAQGMGQQVAYNPGMVYMPPQSHNGDIST

SEQ ID NO: 11200 - protein, 211 aa, Paxillus involutus
MAEGSNYDFLFKVVLIGDSGVGKSNLLSRFTRNEFNLDSKSTIGVEFATRSINVDSKTVKAQIWDTAGQERYRAITSAYYRGAVGALLVYDISKHATYVNVTRWLKELRDHADSNIVIMLVGNKSDLKHLRAVPTEEAKNFSAENELSFIETSALDASNVESAFQTILTDVYRIVSTKSLEQSSDPIRAPTSDTIPVAIDSSAPTKNGSCC

SEQ ID NO: 11201 - protein, 419 aa, Rhodococcus ruber
AAERERMIWRVGDLLTQRAEEFGQLEALDNGKSAVIAAAVDTAWSADIFRYYAGWATKIEGSTVNVTMPFVPGGEFHAYTLREPVGVCGLIVPWNFPLLMAAFKLAPALAAGNTVILKPAEQTPLTALLLAEIFEEAGFPPGVVNIVPGFGDAGAALAAHDDVDKIAFTGSTEVGKKVVDAAKGNLKKVSLELGGKSPNIVFADADFDAAVQGSLDAWLFNHGQCCVAGTRLFVERPIFERFTEAVAEAASKVKIGPGLDPATQLGPLVSQEQLDRVTGYLREGLIDGARALTGGKRWGDKGFFVEPTVLVDVQPDFSVVREEIFGPVVNAMPFDADDGISAAANDSIYGLAAGIWTRDLSKAHRTARRLKAGSVWINQYNGFDTAMPFGGFKQSGWGRELGAGALDLYTQTKAVNIAL

SEQ ID NO: 11202 - protein, 375 aa, Zea mays
  misc_feature (362)..(362): Xaa can be any naturally occurring amino acid
RVTGKTKDEIEESISMVEILAVQLSKREAELLQQKEEVTKFAKSLKQASEDAKRIVEEERANAHTEIETAKGAVQRVQQAVQEHEKMSQNTGKQKQDMEELKKEVREARRIKMLHQPSKAMDLENEIRILRNTFAEKSKDCVSLLKELETHKRLKENGTIPSFDLEGLQCLGSMLRIVGLSGTHMDLSNISIQWFRIHPKESNKEIISGATRPVYALEPHDVGRYLQAEIDVGGEIAVAKTAGPVDPDAGLVDYVETLVRKPETEFNVVVLQSNGVDQPKESVHVLNVGRLRMRLTKGKSVVAKEFYSSSMQLCGVRGGGEAASQAMFWRPRNDLSLVLAFESTRERNTAIMLARRFAVDCXNIILAGPGDKTPW

SEQ ID NO: 11203 - protein, 413 aa, Aspergillus fumigatus
MPLTPEQVQIIKATVPVLAEHGTTITTVFYKNMLTAHPELNNVFNTTHQVTGHQARALAGALFAYASNIDNLGALGPAVELMCHKHASLYIKPDDYKIVGKFLLEAMGQVLGDALTPEILDAWATAYWQLADIMIGREAQLYEQAEGWTDFRDFVVALKVPESSEITSFYLKPADGKPLPAFQPGQYISVQVHVPELNYLQARQYSLSDMPRSDYYRISVKKESGLNPAEPGAKAHPGHVSNILHASVNEGDTIKVSHPFGDFFLSDAKAAHPVVLLSAGVGLTPMTSILNTLTSQAPERKVSFIHGARNARARAFKNHITSLEQKLPNLKSTFFTSHPTEEDKEGDDYQFRGRVDLSQLDSNRDLFLDDATTEYYVCGPDTFMTDMLNVLKSKGVSEDRVKLELFGTGGVPH

SEQ ID NO: 11204 - protein, 315 aa, Arabidopsis thaliana
MRIDLSVPKVGAELELNKVLGKGSSGSVSLIKYKSRLDGQTLYAAVKTSNIIHADSLLKEFQILSEFKGCSRIVQCYGTKVQETINEEGDVEFTIPMEYASGGSLRHFMSRFKDMKLPDALIRRFTRMILEGLAVIHGHGYVHCDLKPENILVFPSFELKISDFGLSKREGDSKWWLPSHPFAGTPVYMSPESISNGETRRGLDLWSLGCVVLEMYTGKRPWWDKNYDLGDLKKGSMPLISKDIPCDAKLFVMTCFASETNKRKNAFTLLRHCFLRGDVNKIIEPLVKSKNSNDIALELENIEHRLSQLRCISGG

SEQ ID NO: 11205 - protein, 150 aa, Lactobacillus delbrueckii subsp. lactis
  misc_feature (137)..(137): Xaa can be any naturally occurring amino acid
NREIYNFKPLREELIKAGHTFSTKADTEVILHGYEEWGMDGILKRVRGMFAFIIWDDNTQTMYGARDFFGIKPMYYQDVDGHLLVGSELKSFLPFPHFKKELNTEAVKPYLMNQYNDLKETFFKGVYRFQPGHWFEXKDGKMKTHQYWDA

SEQ ID NO: 11206 - protein, 222 aa, Triticum aestivum
  misc_feature (11)..(11): Xaa can be any naturally occurring amino acid
  misc_feature (31)..(31): Xaa can be any naturally occurring amino acid
FYKLLIDNVEXELLPVVYTPVVGEACQKYGXSIYRRPQGLYISLKDKGKVLEVLKNWPERSIQVIVVTDGERILGLGDLGCQGMGIPVGKLSLYTALGGVRPSACLPITIDVGTNNETLLNDEYYIGLRQRRATGEEYHELLQEFMNAVNLLPPHANQLKLQRRNLKHRLVFFCVRLCVCVLLCCSTLLCCTVMYCLREHGTHLSICVEVRHRRRRFFCQIS

SEQ ID NO: 11207 - protein, 357 aa, Triticum aestivum
  misc_feature (183)..(183): Xaa can be any naturally occurring amino acid
MGSMAAEMTAVEEEACIYAMQLSSTAVLPLTLKNAIELGMLEVLMGAGGKMLSPSEVAARLPPTTTNPDAPAMVDRMLHLLASYKVVSCEVEEGTHARRYGPTPVCKWFTPNQDGISMAPLLLLTNDKVPMESLYHLKDAVLDGGLPFHKAHGMTMYEYTKTDARLNRVFNEAMKGYTTIITXKLVDLYTGFHRIAILVDVGGGVGSTIRAVTSKYPHIKGINFDLPHVIAEAPQSPGVQHVAGDMFKNVPSGDAIILKWILHNWPDEHCTTLLKNCYGALPAQGKVVIVEGILPVKPEATSRGQQASLTDMIMLTHTAGGKERNQREFEELAMSAGFTSVKTAYIHSNTWVIEFTK

SEQ ID NO: 11208 - protein, 356 aa, Lactococcus lactis subsp. lactis Il1403
MRAARFYDRGDIRIDEINEPIVKAGQVGIDVAWCGICGTDLHEFLDGPIFCPSAEHPNPITGEVPPVTLGHEMSGVVNFIGEGVSGLKVGDHVVVEPYIVPEGTDTSETGHYNLSEGSNFIGLGGNGGGLAEKISVDERWVHKIPDNLPLDEAALIEPLSVGYHAVERANLSEKSTVLVVGAGPIGLLTAAVAKAQGHTVIISEPSGLRRKKAQEAQVADYFFNPIEDDIQAKVHEINEKGVDAAFECTSVQPGFDACLDAIRMGGTVVIVAIWGKPASVDMAKLVIKEANLLGTIAYNNTHPKTIDLVSTGKIKLDQFITAKIGLDDLIDKGFDTLIHHNETAVKILVSPTGKGL

SEQ ID NO: 11209 - protein, 344 aa, Mesorhizobium loti MAFF303099
MSNMMKALVKAKAEPGIWMEEVPVPEIGPNDVLIKIRKTAICGTDVHIYNWDQWAQKTVPVPMVTGHEFVGTVADFGAAVTEYKVGQRVSGEGHIVCGHCRNCRAGRGHLCRNTLGVGVNRPGAFGEYLAIPQHNVVPIPDDVPDEIAAIFDPLGNAVHTALSFDLVGEDVLVTGAGPIGIMGALVAQCVGARKVVITDINPVRLALAKKLGVQHVVDASKEKLRDVMPVLGMTEGFDVGLEMSGAAPAFRDMIDTMNNGGKIAILGIAPTGFEIDWNKVIFKMLHLKGIYGREMFETWYKMIALVQGPLDVSGLITHRIGIDDFQEGFDAMRSGSSGKVVMDW

SEQ ID NO: 11210 - protein, 346 aa, Escherichia coli CFT073
MKSVVNDTDGIVRVAESVIPEIKHQDEVRVKIASSGLCGSDLPRIFKNGAHYYPITLGHEFSGYIDAVGSGVDDLHPGDAVACVPLLPCFTCPECLKGFYSQCAKYDFIGSRRDGGFAEYIVVKRNNVFALPADMPIEDGAFIEPITVGLHAFHLAQGCENKNVIIIGAGTIGLLAIQCAVALGAKSVTAIDISSEKLALAKSFGAMQTFNSREMSAPQIQGVLRDLRFNQLILETAGVPQTVELAVEIAGPHAQLALVGTLHQDLHLTSATFGKILRKELTVIGSWMNYSSPWPGQEWETASRLLTERKLSLEPLIAHRGSFESFAQAVRDIARNAMPGKVLLIP

SEQ ID NO: 11211 - protein, 382 aa, Burkholderia cepacia R18194
MMRDAANFEPTDSRVTRPAFWNGLPERWTSDVEETLVCCHVRQETHDVKSFFFRSPQGRSFSFEPGQFLTLELDIDGETINRCYTISSSPARPHTVSITVKRVPGGKVSNWLHDNLQPGAPVRVLGPAGEFTCARHPARKYLFLSAGSGVTPLMSMSRAHHDLAEDRDILFVHSARTPDDIIFARELDLIASNHTNFRTSFVVERVGARTNWPGVTGFLTLPLLKLIAPDFMEREIFTCGPAPYMKAVRDLLDEAGFERKQYHEESFSFETLAQTASDELLADLAPPAEGADTDTKQYTVSFAKSNREISCGSEQHVLDAARQSGVRLPASCTQGMCGTCKVKLVSGQVEMKHNGGIRQREIDQGMVLLCCSKPLSDLVIDK

SEQ ID NO: 11212 - protein, 180 aa, Bacteroides thetaiotaomicron VPI-5482
MKSFILMVITMVCAISLEAQNKSFYDFNVTTIDGKEFPLSSLKGKKVLVVNVASKCGLTPQYAKLQELYDKYKDKNFVIIGFPANNFMGQEPGSNEEIAQFCSLKYDVTFPMMAKISVKGKNMSPLYQWLTEKKLNGKEDAPVQWNFQKFMIDENGNWVGFVAPKESPLSEKIVTWIEQE

SEQ ID NO: 11213 - protein, 318 aa, Ralstonia eutropha JMP134
MNQLEQLKQFTTVVADTGDFQLMKQYTPQDATTNPSLILKAVQKPEYRGLLEQAVRDYHNEGGVDAVMDGVLIAFGCEILAIVPGRVSTEVDARLSFDTEATVEKARHLIRLYEQRGVARERVLIKIASTWEGIRAAEILQREGIRCNMTLLFSLVQAVACAEAGAQLISPFVGRILDWYKKQAGDQWDAAANAGDNDPGVRSVRQIYDYYKKFGYNTEVMGASFRSTAQIVALAGSDLLTISPDLLEQLARTEGTVERKLSVDLAQAGNIARIPADEPAFRWQLNEDAMATEKLAEGIRLFAADAIKLEKLVAEIAG

SEQ ID NO: 11214 - protein, 318 aa, Psychrobacter sp. 273-4
MDKRVSIQWFPGHMNKARNEIKEIMPQMDVVIEVIDARIPYSSENPMVAALRGEKPVIKILNKADLADPELTQAWMDYLEQQNGVKAIACDTDKANDVKRIIAICKQLVPNKVGTGRQIKAMIMGIPNVGKSTLINTLAGRAVARTGDEPAVTKSQQLIKLDDDIMLYDTPGMLWPKVENENSGYRLAATGGIRDTAFDFADVASYTAEYLLTAYPELLKTRYKIEELPKTDWEFFEIAGRNRGCVRAGNKVDTYRMSEILVNELRSGKIGRITLEKPAMTEAEEVIVAEQRIASEEKRIAKEEEKRLRRLKTRKNRK

SEQ ID NO: 11215 - protein, 387 aa, Streptomyces coelicolor A3(2)
MEAPHRLRTGRRTPLITRSRLMSDFVPGLEGVVAFETEIAEPDKEGGALRYRGVDIEDLVGHVSFGNVWGLLVDGAFNPGLPPAEPFPIPVHSGDIRVDVQSALAMLAPAWGLKPLLDIDAAQARDDLARAAVMALSYVAQSARGQSLPMVPQREIDKAQSVVERFMIRWRGEPDPKHVAAVDAYWTSAAEHGMNASTFTARVIASTGADVAAALSGAVGAMSGPLHGGAPSRVLHMIEEIERTGDAEAYVKKTLDAGERLMGFGHRVYRAEDPRARVLRRTARELGAPRYEVAEALEKAALAELHARRPDRVLATNVEFWAAIMLDFAEVPAPMFTSMFTCARTAGWSAHILEQKRTGRLVRPSARYTGPGTRDPREIEGYADIAG

SEQ ID NO: 11216 - protein, 488 aa, Chloroflexus aurantiacus
MAMRYLIKNGTIIDPANRVATIGDILVANGKVERLYDLADLHTDREPLAPDVEVINARGCVVAPGFTDLHTHLRQPGEEHKETIASVSAAAAVGGFTTLCARPTTRPTPDHAAAIRQLRELADQYARVRIDLIGALTMGNEGQVLSEMRELAEAGCIAFSDGGRTIANTALLRHALAYAAALKLPVMVSCQDPYLAAGGVAHEGAVSIRLGLPAIPAAAEEAIVARDIALAEATGAHLHISRVSTAGSVALIRAARARGVHVTAEVTPHHLTLSDRWLLGWLEERNEIETGRPGAHPDLSLPSWLNPALLPPYDSSTRVDPPLRSIEHVEALVEGLRDGVIDAIATDHAPHALVDRDCEYGIAPPGISGLETALALTLTLVHRGEMDIVNLIAKLTEGPAQVLNRSPANLRPGATADIVIFDPERSWVVDPDHFASRGRNTPLRGQRLKGQVMLTMAAGKIIFRREDFGRQAQAAPQPSRLEGILGAE

SEQ ID NO: 11217 - protein, 88 aa, Glycine max
EGERHSSPLDCIPSTLFLTEVTYVDFLDRVHTSEVKLRSKGLWDVPHPWLNLFIPKTKIHHFAEVVFGNIVKETSNGPVLIYPVNKSK

SEQ ID NO: 11218 - protein, 214 aa, Neurospora crassa
MSDHEFGALSTPSSTEKCGDHSAKMDEYSGYRYAYASEPWIVSGSGVSPPPSSLLFDSFLFLSGYWDAVSSRDVVVEDNAKQLGEPKATFRLATVQKIVSEILPSSTGLSFAKEARDLLIDLCVEFISLVSSEANEISEKESKKTIACDHITQALERLGFADYVPAVLEAAAEHKEVQKGREKKANKFEQSGLSLEELERIQREQFADAAARHT

SEQ ID NO: 11219 - protein, 452 aa, Rubrivivax gelatinosus PM1
MGDSLNAALLQRDHRHLVHSLHNEAAHLAGNVWVKGEGTTLTDADGKRYVDAMSGLWNVTLGYGRRELVDAAAAQMGELAYASGYAGSTNLRAMELAEKLAADRVYPNMHRFFFTSGGGESTDSTIKTARYYWKAQGKPGKFKTLSVMGGYHGVTLAAMCATGMPAYWPSFEPRMPGFVHIPNHDAYRYTVPPGGDPATAAADELERAILAEGPDTVALFIAEPVMGGGAYVPPAGYFRRIREICDRYDVLFATDEVITGFGRTGKLFALGHWGSDVQPDLVQFAKGITSGYVPMGGVGLSDKVAAVFDRPGADTWMHCYTYSGHPVACAVALATLDVIEREGLLARAQVLGDRLLRGLRGALGGHPNVGDIRGLGLIAAVELVEDRFSKKSFDPARKMGPQVLAQVRQRGVITRGRGDTIYLGPALVSDEATIDRIVEAVAEGVGALLPAA

SEQ ID NO: 11220 - protein, 642 aa, Glycine max
MLLRPEGWLGLLAVMEPVVVGLGVGLVVLNEAGLGLLIDPLLVLIDDSDRVEIRGNGERGFEGDVGFFVVGFCNQQATTLLLLALHVERSDLIDIEAVEGLKDALDLDLRGRRNGLESDFVDVGEAVRHQKLYGEFLFAAAMCGILAVLGCVDNSQTKRARIIELSRRGPDWSGIHCYEDCYLAHQRLAIVDPTSGDQPLYNEDKTVIVTYEEHGEEFVNMLDGMFAFILLDTRDKSFIAARDAIGITPLYLGWGHDGGLRRWYNPPWFSEDIPSTPYDPTLLRETFERAVVKRMMTDVPFGVLLSGGLDSSLVAAVVNRYLAESESARQWGSQLHTFCIGLKGSPDLKAAKEVADYLGTRHHELYFTVQEGIDALEEVIYHIETYDVTTIRASTAMFLMSRKIKALGVKMVLSGEGSDEIFGGYLYFHKAPNKKEFHEETCRKIKALHLYDCLRANKSTAAWGVEARVPFLDKEFINVAMSIDPEWKMIRPDLGRIEKWVLRNAFDDDKNPYLPKHILYRQKEQFSDGVGYSWIDGLKDHANKQVTDATMMAANFIYPENTPTTKEGYLYRTIFEKFFPKNAAKATVPGGPSVACSTAKAVEWDAAWSKNLDPSGRAALGIHDAAYDAVDTKIDEPKNGTL

SEQ ID NO: 11221 - protein, 447 aa, Wolinella succinogenes
MKSLIWFRRDLRLEDNRTFEQASGEVLPLFIFDSHLLSPLPKEDRRVGYIYGEVMRLKSELRARGLDLAIFYGEPLKILSRLKEQGFSRLFASQDYDSYALSRDEAARELLDCRFVLDNYLFDPNEVLKKEGSPYTIFSAYYNQSLKILSEGHYAKGLDLPKKLAPYPIPAPPSLESMGFSPLPLLESLKILPQKRLEEFSSKITRYALDRDSLEAEATSGLSLFLRFGTLGVREVIRRLKVWQEEGIKVAPFYRQILWREFYAMLLYHFPHSEREDFKPMQMRWSESQERLERWQKGECGVPLVDAGMRELNHTGFMHNRARMVCASFLTKNLHLHWSWGERYFASKLLDYDVAQNAGNWQWCAGSGADAQPFFRIFNPYTQSLKFDPKGEYVKRWIPELRGISTQNWSSEERWEGLKERYLAPIVSAKRSAQEAKAMQNTLRVSS

SEQ ID NO: 11222 - protein, 189 aa, Cucumis sativus
MASSILSSAAVASVNSASPAQASMVAPFTGLKSSAGFPITRKNNVDITTLASNAGKVQCMKVWPPLGLRKFETLSYLPDMSNEQLSKECDYLLRNGWVPCVEFDIGSGFVYRENHRSPGFYDGRYWTMWKLPMFGCTDSSQVIQEIEEAKKEYPDAFIRVIGFDNVRQVQCISFIAYKPQVLLFLSSIC

SEQ ID NO: 11223 - protein, 451 aa, Zea mays
MAEHKGNVLLHKYEMGKLLGQGTFAKVYHARNTATSESVAIKVIDKEKVMKVGLIDQIQREISVMKLVRHPNIVQLYEVMATKTKIYFVLEHVKGGELFNKIQRGRLKEDAARKYFQQLICAVDFCHSRGVYHRDLKPENLLLDENSNLKVSDFGLSALAECHRQDGLLHTTCGTPAYVAPEVINRKGYDGAKADIWSCGVILFVLLAGYLPFHDKNLMDMYKKIEKADFKCPSWFSTDVRRLLQRILDPNPSRRISVKKIMENPWFRKGLGAKLLRYDLQNKNAPHVDKKADFDSLSTNVTTESKQHEEKKPTNMNAFDIISLSTGLDLSGLFEESNKKRESKFTSTNTSSTIISKIEDIAKNLRLNLTKKDGGLLKMEASKPGRKGVMGIDAEVFEVSPNFHLVEIKKTNGDTLEYQKVLNQEMRPALKEIVWAWQGEQSKQKQEQQSC

SEQ ID NO: 11224 - protein, 236 aa, Lotus corniculatus var. japonicus
MLCTRILFFSRTIRFAAPLSSSSLHSFVFSNSPITLSRSYHSSLLTTTSFPIKSLVSTSTTPFSFTLRPDHTMAAPTSVYDFTVKDARGNDVNLGDYKGKVLLIVNVASQCGLTNSNYTELSQLYEKYKSKGLEILGFPCNQFGAQEPGDNEQIQEFVCTRFKAEFPVFDKVDVNGDSAAPLYKYLKSSKGGLFGDKIKWNFSKFLVDKEGNVVERYAPTTSPLSIEKDLVKLLGA

SEQ ID NO: 11225 - protein, 1794 aa, Schizosaccharomyces pombe
MSYPNQMNGSMYGYGANNGVQPGFDSYGMPINQGGMNYQQQTYPYQQPYQPDGYAGNTMLPFQQSQPATQFNNGFGYASQPTGSVADYGQQQQQMYGYNGMMPQTMNNTGFMQPQQTGAIPGFAPQPTGFVQPQPTGFMSQQPASFMQPQRTGGAGFIQPQRTGAMPAYQPQMNNFMQPQKTGGFAPQATGFMQTQPFGAAPSFAPQPTGFVQPQQTGVVMPPQPTGYLQAQPTGPFASFVQPQQTASFMPAAQPLKPQKTGQIHNSKAMDTRLSFVSAADQAKFEQLFKSAVGREEAMSSEIGKAILVRSKLPTVQLSKIWRLSDTTRSGRLLFPQFVLAMYLCNLGLTGKPIPDKVPDGILNEVNAMVDAISFSLDENYAKPTQPIPQAAAQQMAAQMFGGFQQAAGIPSQITGFQPQAMMPQRTGMQPQMTGFQQPMIPQRTGMQPQMTGFQQPMMPQRTGLQPQMTGFQQPMVPQRTGMQPQMTGFQQPMMPQRTGLQPQMTGFQQPMVPQRTGMQPMMPGLQQPMAPQRTGMQPMMPQRTGMQPQMTGFQQPMAPQRTGMQPMMPQRTGMQPQMPGMQQPMAPQRTGMQPMMPQRTGMQQPMAPQRTGMQPMMPQRTGMQPQMPGMQQPMAPQRTGMQPMMPQRTGMQPQMPGMQQPMAPQRTGMQPMAPQRTGMQPMMPQRTGMQPQMPGMQQPMAPQRTGMQPMMPQRTGMQPQMPGMQQPMAPQRTGMQPMAPQRTGMQPQMTGGPMLPQRTGGMAPQPTGMPGQWGFINTPLSNLPGIEALGQQMMPNAPSGGLNNTFQQKKDIPWAISKEEKRIYDQIFDAWDKERKGTLGGNAVLEIFGQSKLTRTELEHIWNLCDHGDKGSLDRDEFAVALHLIYRKLNGNEVPAVLPPELIPPSTRNFTESLNQVKNLIKNDTSNRKPFGAENQSKLKKNSFYDNPSETTEKDATLYRHNDSDASAYVSSARRRDFKEEKIESAPPIINDIDSEIASLKKRIHEKSLVVNALEDKKLAATPANDVQNDSLIYRIKSVQDEINRLSTSNKSPEVASMNVRLEELSTRVSKMLSDINEVDHTIASLSLKLFQAEDTKNSYDQTSPEATQERNRTISSKLAEMEKQKNESKAALEQMKNYVTNIENNIRAKLLPSAANDDAWLSQNVVDESVTRVVKELPVPAPAAPQTLNPPSVSTVQQSKPIESNTHTPEVKATSESPSASSNLEDRAARIKAEAQRRMNERLAALGIKPRQKGTPSPAPVNSATSTPVAAPTAQQIQPGKQASAVSSNVPAVSASISTPPAVVPTVQHPQPTKQIPTAAVKDPSTTSTSFNTAPIPQQAPLENQFSKMSLEPPVRPAVPTSPKPQIPDSSNVHAPPPPVQPMNAMPSHNAVNARPSAPERRDSFGSVSSGSNVSSIEDETSTMPLKASQPTNPGAPSNHAPQVVPPAPMHAVAPVQPKAPGMVTNAPAPSSAPAPPAPVSQLPPAVPNVPVPSMIPSVAQQPPSSVAPATAPSSTLPPSQSSFAHVPSPAPPAPQHPSAAALSSAPADNSMPHRSSPYAPQEPVQKPQAINNIAPATNLGTSQSFSPRMGPVNNSGSPLAMNAAGQPSLAVPAVPSAPSNHFNPFAKMQPPAPSPLQPSGHDSDNWSQHGDEEEEDSEDDIRSSKDAAALAAKLFGGMAPAHPVSTPPVRPQSAAPPQMSAPTPPPPPMSVPPPPSAPPMPAGPPSAPPPPLPASSAPSVPNPGDRSALLQQIHTGTRLKKTVTTDKSKPIAGRVLDASDGNSSAWYGNLS

SEQ ID NO: 11226 - protein, 479 aa, Sphingomonas sp. tfd44
MTYPDTRLFIGGRWQDAADGRSLAVQNPATGLEIGRVAHCGRADLDRALDAAQRGFEIWRDLTPAERSKIMRRAAGLMRERADEIARLLTQEQGKPLHEAKIEAMAAGDIIEWFAEEGFRLYGRLVPHRTDIAIRQMVIKDAVGPVAAFTPWNFPINQVVRKISAALAAGCSMIVKAPEETPASPAELIRAFQDAGLPDGVLNLVFGDPAEISNYLISSPIIRKITFTGSTPVGKLLASLAGKHMKRVSMELGGHAPAIVCEDADIGLAVKSLSASKFRNAGQVCIAPTRFLVHSSIKHAFADALAAAARDLRVGDGFADGTQIGPLANSRRLAAMAEFQQDAIEKGATLLTGGNRVGDVGNFWAPTVLSDVPLEARLFNDEPFGPVAGIRSFDRLEEAILEANRLSFGLAGYAFTKSLATADILARRVEVGMLWVNSPATPTAELPFGGIKDSGYGTEGGPEALDNYINPRAVVVANV

SEQ ID NO: 11227 - protein, 74 aa, Glycine max
MADIDRSFDNNVSAVSTEKSSQVSDVEFSEAEEILIAMVYNLVGERWSLIAGRIPGRTAEEIEKYWTSRFSTSQ

SEQ ID NO: 11228 - protein, 70 aa, Glycine max
AAHTHTYKIEKILFHGKSQYRELLVFETSRQGKGAILDGHIQLTEKDEFAYKETRTHLALWSHTKKKKVL

SEQ ID NO: 11229 - protein, 158 aa, Glycine max
  misc_feature (114)..(114): Xaa can be any naturally occurring amino acid
  misc_feature (145)..(145): Xaa can be any naturally occurring amino acid
ALSMIASITDTTVNLAGAGLDATSTGLKPMVGCPTMKTNNDITYIANNGGRAQCMQVWTPFGSKKYETLSYLPDLDEAQSAKEVEYLIKKGWITCLEYKLDHSFLYRELKMPPXYFEGLSWSLWKVPMFGSTDTSHVLNELQYAXTAYPDSQIRIIGF

SEQ ID NO: 11230 - protein, 512 aa, Salmonella typhimurium LT2
MTNNPPSTRIQPGEYGYPLKLKARYDNFIGGDWVAPADGEYYQNLTPVTGQPLCEVASSGKKDIDLALDAAHKAKDKWAHTSVQDRAAILFKIADRMEQNLELLATAETWDNGKPIRETSAADVPLAIDHFRYFASCIRAQEGGISEVDSETVAYHFHEPLGVVGQIIPWNFPLLMASWKMAPALAAGNCVVLKPARLTPLSVLLLMEIIGDLLPPGVVNVVNGAGGEIGEYLATSKRIAKVAFTGSTEVGQQIMQYATQNIIPVTLELGGKSPNIFFADVMDEEDAFFDKALEGFALFAFNQGEVCTCPSRALVQESIYERFMERAIRRVESIRSGNPLDSGTQMGAQVSHGQLETILNYIDIGKKEGADILTGGRRKELDGELKEGYYLEPTILFGKNNMRVFQEEIFGPVLAVTTFKTMEEALEIANDTQYGLGAGVWSRNGNLAYKMGRGIQAGRVWTNCYHAYPAHAAFGGYKQSGIGRETHKMMLEHYQQTKCLLVSYSDKPLGLF

SEQ ID NO: 11231 - protein, 187 aa, Brassica napus
MSGSLSCSAADLAVLLGPNATAAADYICGQLSTVNNKFTDVAFAVDNTYLLFSAYLVFSMQLGFAMLCAGSVRAKNTMNIMLTNVLDAAAGGLFYYLFGYAFAFGSPSNGFIGKHNFGLKDFPSASADYSNFLYQWAFAIAAAGITSGSIAERTQFVAYLIYSSFLTGFVYPVVSHWFWSVDGWASP

SEQ ID NO: 11232 - protein, 276 aa, Ralstonia solanacearum
MTDTQPAVTLGDGARMPQLGLGLWRTPAGETAGLVRTAIEAGYRLVDTAAAYGNERGVGEGVRAAGAEPAVFVTTKLWNEDQGYDRTLRAFDESLRCLGLPAIDLYLIHWPAPSRGRYVESWRALIRLRDEGRARSIGVSNFGAEHLARIIDETGEAPAVNQIELHPWFQQRALRAFHARHGVRTESWSPLGQGGLLHDLTVREIAARHGKTPAQVVIRWHLDNGLIVIPKSAHPDRIRENIAVFDFCLTPADQAAIAGLDRADGRIGPDPVAAGF

SEQ ID NO: 11233 - protein, 115 aa, Arabidopsis thaliana
  misc_feature (89)..(89): Xaa can be any naturally occurring amino acid
MAFALRFFTCLVLTVCIVASVDAAISCGTVAGSLAPCATYLSKGGLVPPSCCAGVKTLNSMAKTTPDRQQACRCIQSTAKSISGLNPSXASGLPGKCGVSIPYPISMSTNCNNIK

SEQ ID NO: 11234 - protein, 460 aa, Zea mays
MVNGERRADAECTRASLLGRYEIGRTLGEGNFGKVKYARHIATGGHFAIKILDRSKILSLRIDDQIRREIGTLKLLKHPNVVRLHEVAASKTKIYMVLEFVNGGELFDKIAIKGKLSEHEGRRLFQQLIDGVSYCHDRGVYHRDLKPENVLVDRKGTIKISDFGLSALPQHLGSDGLLHTTCGSPNYIAPEVLQNRGYDGSLSDLWSCGVILYVMLVGCLPFDDRNLVVLYQKIFKGDCQIPKWLSPAAQDLLKRILQPNPMKRINVAGIREHEWFKKDYVPAVPHDDDEDVLPSPAPSIKPIDEPAQEKCSPINAFQLIGMASSLDLSGFFEEEDAAQRKIRFTSTHPPKDLFDKIESVVMEMGFKVHRGAGKLKVLKNSKCSRNPSSLLVCTEVFELGPSLYVVELRKSHGDSTLYRQLCERLSDELGACKTDQIARTESSSDDLSSVDGEAFPLSGF

SEQ ID NO: 11235 - protein, 321 aa, Malus x domestica
ILPFKLPAIGPNDVRIRIKAVGICGSDVHYLKTMKCADFEVKEPMVIGHECAGIVDKVGSEVKHLVPGDRVAVEPGISCARCQQCKGGRYNLCPDMKFFATPPVHGSLANQIVHPADLCFKLPKNVSLEEGAMCEPLSIGVHACRRANVGPETTVLITGAGPIGLVSVLAARAFGAPRIVIVDMDDKRLAMAKSLGADETVKVSTKMEDLDDEVAEIKKAMESEVDVTFDCVGFNKTMSTGLNATRPGGKVCLVGMGHGMMTVPLTPAAAREVDVVGVFRYKNTWPLCLEFLRSGKIDVKPLITHRFGFTEKEVEEASLEF

SEQ ID NO: 11236 - protein, 205 aa, Zea mays
  misc_feature (105)..(105): Xaa can be any naturally occurring amino acid
MAASSTATSVHDFIVKDASGKDVDLSTYKGKVLLIVNVASQCGLTNSNYTELAQLYEKYKDQGFEILAFPCNQFGGQEPGTNEEIVQFACTRFKAEYPIFDKVLXDVNGSNAAPIYKFLKSSKGGLFGDSIKWNFSKFLVDKEGRVVDRYASILPGSPCHQISPRMNSFPSSWLTRRDRVVDRYAPTTSPLSIEVNFQRCSSHLL

SEQ ID NO: 11237 - protein, 201 aa, Shigella flexneri 2a str. 301
MALHDENVVWHSHPVTVQQRELHHGHRGVVLWFTGLSGSGKSTVAGALEEALHKLSVSTYLLDGDNVRHGLCSDLGFSDADRKENIRRVGEVANLMVEAGLVVLTAFISPHRAERQMVRERVGEGRFIEVFVDTPLAICEARDPKGLYKKARAGELRNFTGIDSVYEAPESAEIHLNGEQLVTNLVQQLLDLLRQNDIIRS

SEQ ID NO: 11238 - protein, 192 aa, Penicillium marneffei
MVVATIKCVVVGDGAVGKTCLLISYTTNKFPSEYVPTVFDNYAVTVMIGDEPYTLGLFDTAGQEDYDRLRPLSYPQTDVFLVCFSVTSPASFENVREKWFPEVHHHCPGVPCLIVGTQTDLRDDPAVREKLAKQKMQPVRKEDGDRMAKELGAVKYVECSALTQYKLKDVFDEAIVAALEPAPKKRPKCVVL

SEQ ID NO: 11239 - protein, 54 aa, Zea mays
MGSETFVEILLAILLPPVGVFLRYGIGVEFWICLLLTILGYIPGIIYAVYVLVA

SEQ ID NO: 11240 - protein, 223 aa, Triticum aestivum
  misc_feature (112)..(112): Xaa can be any naturally occurring amino acid
LTSFEAGCSTSTSTQSPSPRLPAHRHHPSMAAAAKRGGTGSRGLLMGRYELGRVLGKGTFAKVYHARHLQTGESVAIKVLDREKAVRSGLVSHIKREIAVLRRVRHPNIVHXLFEVMATKTKIYFVMELVRGGELFSRVSKGRLKEDIARRYFQHLISAVGFCHTRGVFHRDLKPENLLVDEAGNLKVSDFGLSAVAEPFQPEGLLHTFCGTPAYVAPRCPRP

SEQ ID NO: 11241 - protein, 378 aa, Nostoc sp. PCC 7120
MMVCEYKPGLEGIPAAQSSISYVDGQKGILEYRGIRIEDLAQQSTFLETAYLLIWGELPTKEELQVFEEEVRLHRRIKYRIRDMMKCFPESGHPMDALQASAAALGLFYSRRDLHNRCYIRDAVVRLIATIPTMVAAFQLMRKGNDPVKPRDDLDYSANFLYMLNEKEPDALAAKIFDICLILHVEHTMNASTFSARVTASTLTDPYAVVASAVGTLGGPLHGGANEEVIQMLEEIGSVENVRSYVEERLQRKDKLMGFGHRVYKVKDPRATILQGLAEQLFAKFGADKYYDIAQEMERVVEEKLGHKGIYPNVDFYSGLVYRKMGIPTDLFTPIFAIARVAGWLAHWKEQLEENRIFRPTQVYNGKHSVTYTPIDQR

SEQ ID NO: 11242 - protein, 449 aa, Zea mays
MSASVGRTRVGRYELGRTLGEGTFAKVKFARNVETGENVAIKILDKEKVLKHKMIAQIKREISTMKLIRHPNVIRMYEVMASKTKIYIVMELVTGGELFDKIASRGRLKEDDARKYFQQLINAVDYCHSRGVYHRDLKPENLLLDASGTLKVSDFGLSALSQQVREDGLLHTTCGTPNYVAPEVINNKGYDGAKADLWSCGVILFVLMAGYLPFEDSNLMSLYKKIFKADFSCPSWFSTSAKKLIKKILEPNANNRITIAELINNEWFKKGYQPPRFETADVNLDDVNSIFDESGEPAQLVVERREERPSVMNAFELISTSQGLNLGTLFEKQTGSVKRETRFASRLPANEILSKIEAAAGPMGFNVQKRNYKLKLQGENPGRKGQLAIATEVFEVTPSLYMVELRKSNGDTLEFHKFYHNISNGLKDVMWKPESGIVEGDEARQRRSP

SEQ ID NO: 11243 - protein, 320 aa, Arabidopsis thaliana
MWVVIAVSHCLRELEVIYSSYPEKPNILPSNLYTCKSLVILELCGEIRLDVPRMAFLPSLKTLQLHSVRYLNEDSLHRLLSNCPVLEDLLVDLLLSDSMEKLTVVVPSLQILSLFIPHSYEIDGIVIETPSLKYFKLIDHNSKSHYCLVKNMPNLIEADIDVELHSIKSLIGSITSVKRLSICSQAMYDGGFVFNQLKHLKLCRCKGHSSDLLVRLLKDSSNLQALDLSEMDYHENHDILYWHQPSTVPECMLLSLQTLNLSAYRGTPEERDLAVYFLKNAVHLKTTTIKSCVFDDERFDMLKELALSSRASTTCQLVFD

SEQ ID NO: 11244 - protein, 143 aa, Triticum aestivum
  misc_feature (99)..(99): Xaa can be any naturally occurring amino acid
  misc_feature (111)..(111): Xaa can be any naturally occurring amino acid
MAPAVMASSATTVAPFQGLKSTAGLPVSRRSGSAGLSSVSNGGRIRCMQVWPIEGIKKFETLSYLPPLSTEALLKQVDYLIRSKWVPCLEFSKVGFVFXVSNNSSPGYYDXRYWTIVESCLCSGWNRTQTARLKRLEGRSKGP

SEQ ID NO: 11245 - protein, 168 aa, Arabidopsis thaliana
MEGVGSRLSRTSSRYSGPAATAVFSGRVRKWKKKWVRVSTSSVGVFRASKSNGRNNSNNSNSPHHLLLHKWTPLTSATVTASDANGSGETEESPKRRFRYAPIAMLEHREKVISKDSEIEETEEFDTESPLPKAVELDMNLTDSDQTKEAKTGNLNLGLCLNSEGTEE

SEQ ID NO: 11246 - protein, 338 aa, Methanosarcina barkeri str. fusaro
MRLAVIEGDGIGREIIPAAVKVLDAFGLEFEKVPLELGYTRWERTGTAISNNDLETIKGCDAVLFGAITTVPDPNYKSVLLTIRKELDLYANVRPVKPLPGITGVTGRNDFDFIIVRENTEGLYSGIEEIGPELSWTKRVVTRKGSERIAEYACKLAKKRKNKLTIVHKSNVLKSDKLFLDVCRQTASANGVEYEDMLVDSMAYNLIMRPERYDIVVTTNLFGDILSDMCAALVGSLGLVPSANIGEKYAFFEPVHGSAPDIAGKGIANPLAAILCVKMLLEWMGEPRSQIIDEAIAYVLQKKIITPDLGGTASTMEVGNAVAEYVLSNIQDRRSPPW

SEQ ID NO: 11247 - protein, 365 aa, Apium graveolens
MAKSSEIEHPVKAFGWAARDTTGLLSPFKFSRRATGEKDVRLKVLFSGVCHSDHHMIHNNWGFTTYPIVPGHEIVGVVTEVGSKVEKVKVGDNVGIGCLVGSCRSCESCCDNRESHCENIIDTYGSIYFDGTMTHGGYSDTMVADEHFILRWPKNLPLDSGAPLLCAGITTYSPLKYYGLDKPGTKIGVVGLGGLGHVAVKMAKAFGAQVTVIDISESKRKEALEKLGADSFLLNSDQEQMKGARSSLDGIIDTVPVNHPLAPLFDLLKPNGKLVMVGAPEKPFELPVFSLLKGRKLLGGTINGGIKETQEMLDFAAKHNITADVEVIPMDYVNTAMERLVKSDVRYRFVIDIANTMRTEESLGA

SEQ ID NO: 11248 - protein, 337 aa, Streptococcus pyogenes M1 GAS
MKRIAVLTSGGDAPGMNAAIRAVVRKAISEGMEVYGINRGYAGMVDGDIFPLGSKEVGDKISRGGTFLYSARYPEFAQLEGQLAGIEQLKKHGIEGVVVIGGDGSYHGAMRLTEHGFPAVGIPGTIDNDIAGTDYTIGFDTAVNTAVEAIDKLRDTSSSHGRTFVVEVMGRNAGDIALWAGIASGADQIIVPEEEFDIEKVASTIQYDFEHKGKNHHIIVLAEGVMSGEAFAQKLKEAGDKSDLRVTNLGHILRGGSPTARDRVIASWMGSHAVELLKDGKGGLAVGIHNEELVESPILGTAEEGALFSLTEEGKIIVNNPHKARLDFAALNRSLSQ

SEQ ID NO: 11249 - protein, 172 aa, Cucumis melo
MDTKIGSLDTCKPQNNVVCCPSNGSVCTIQNSVVPSTVVNSSDATLGRHLARRLVQIGVTDVFTVPGDFNLTLLDHLIAEPALNNIGCCNELNAGYAADGYARSRGVGACVVTFTVGGLSVLNAIAGAYSENLPLICIVGGPNSTIMELTESFIYNGLPDLSQNSKVLKRYL

SEQ ID NO: 11250 - protein, 182 aa, Triticum aestivum
  misc_feature (114)..(114): Xaa can be any naturally occurring amino acid
  misc_feature (136)..(136): Xaa can be any naturally occurring amino acid
  misc_feature (142)..(142): Xaa can be any naturally occurring amino acid
  misc_feature (146)..(146): Xaa can be any naturally occurring amino acid
  misc_feature (156)..(156): Xaa can be any naturally occurring amino acid
  misc_feature (161)..(161): Xaa can be any naturally occurring amino acid
MAPTVMASSATSVAPFQGLKSTAGLPVSRRSNGASLGSVSNGGRIRCMQVWPIEGIKKFETLSYLPPLSTEALLKQVDYLIRSKWVPCLEFSKVGFIFREHNASPGYYDGRYWXTMWKLPMFGCTDATQVINEVEXVKKEYXDAYXRIIGFTTSQXQCVSXSPSNGLQESGQTATHTGIYKC

SEQ ID NO: 11251 - protein, 429 aa, Zea mays
MAKSKSSAKAGPPLLGKYELGHLLGRGNFAKVYHARCLGGGDPVAVKVLDKAGLAATGMASRLLREVSAMRRLSHPNVLRLHEVLATRSKVYLVMELAPGGDLLSRLASLPSRRLPEHAARRVFLQLASALIYSHARGVFHRDVKPQNVLLDAEGNLKVSDFGLAALPDSVRDDGRLHTACGTPAFAAPEVLRRRAYDGAKADAWSCGVILFVLLAGHLPFDDANIADMCRRAHRREYTVPRWVSQPARRLVARLLDPNPATRLAVAELAGHPWFKRSLSVDSQLGGLLDGQAERELAFQAPPALNAFDIISMSPGLDLSGLFGEGRRRREKRFMTTASPERAVERLAQAGARLGYFIVGKKGAERLPLGVLPGLVAMSMEMSEVSPELMLVELRLEGGHGDEDEAFGWEELRVELGDVVTAWHVSEEG

SEQ ID NO: 11252 - protein, 357 aa, Rubrobacter xylanophilus DSM 9941
MPEKKMMRAAVYRGPRELRVEPVPVPEIGPSDVLVRVHSCGICGSDLHSYKAGMYIRPGQIMGHEFMGTVAAAGEDVEGVEEGDRVTGFSIGVCGSCYWCSRQQYILCPELFRNSTGYGLPGGFAEYVPIRNAVVGQSIHPVPSELDDETAATTEPVSVGVGAIEAAGVRPGDRVVVLGAGMIGNACMQAARAAGAGQVAVIDVSPVRLEAARSLGADAVFDARTGDALSWVKELWGVGRYHFNEGGMADVVVEAAGAPVTVQQAFEMVRSGGAIVFVGLPEEPAPIDVTKIVHKQPRIVGSLGGDFARAIELMASGSIRTKELITHRFPLEDAAEAFETQLRTGEAMKVMIQPREG

SEQ ID NO: 11253 - protein, 501 aa, Novosphingobium aromaticivorans
MATQLRSAENEYGIKSEYGHYIGGEWIAGDSGKTIDLLNPSTGKVLTKIQAGNAKDIERAIAAAKAAFPKWSQSLPGERQEILIEVARRLKARHSHYATLETLNNGKPMRESMYFDMPQTIGQFELFAGAAYGLHGQTLDYPDAIGIVHREPLGVCAQIIPWNVPMLMMACKIAPALASGNTVVLKPAETVCLSVIEFFVEMADLLPPGVINVVTGYGADVGEALVTSPDVAKVAFTGSIATARRIIQYASANIIPQTLELGGKSAHIVCGDADIDAAVESATMSTVLNKGEVCLAGSRLFLHQSIQDEFLAKFKTALEGIRQGDPLDMATQLGAQASKMQFDKVQSYLRLATEEGAEVLTGGSRSDAADLADGNFIKPTVFTNVNNSMRIAQEEIFGPVTSVITWSDEDDMMKQANNTTYGLAGGVWTKDIARAHRIARKLETGTVWINRYYNLKANMPLGGYKQSGFGREFSHEVLNHYTQTKSVVVNLQEGRTGMFDQ

SEQ ID NO: 11254 - protein, 387 aa, Rickettsia sp. Rf31
SNNNDSEFAELKIRGKIFKLPILKASIGEDVIDISRVSSEADCFTYDPGFMSTASCQSTITYINGDKGILRHRGYDIKDLAEKSDFLEVAYLLIYGELPSIEQYNNFTKQVAHHSLVNERLHYLFQTFCSSSHPMAIMLAAVGSLSAFYPDLLNFKEADYELTAIRMIAKIPTIAAMSYKYSIGQPFIYPDNSLDFTENFLHMMFATPCTKYKVNPIIKNALNKIFILHADHEQNASTSTVRIAGSSGANPFACVSTGIASLWGPAHGGANEAVINMLKEIGSSKNIPKYIAKAKDKNDPFRLMGFGHRVYKNYDPRAVVLKETCKEVLKELGQLENNPLLQIAIELEAIALKDEYFIERKLYPNVDFYSGVIYKAMGIPSQMFTVL

SEQ ID NO: 11255 - protein, 280 aa, Glycine max
  misc_feature (204)..(204): Xaa can be any naturally occurring amino acid
MGVFSENPNPDPVVIRQVWASNLESEFQLIRELIDHYPFISMDTEFPGVVFRPHLDPTKPYNHRNNNRNRHSDHYRLLKSNVDALNLIQVGLTLTDAAGNLPDLAGNRSIWEFNFRDFDVARDAYALDSIDLLRRQGIDFARNATDGVESTRFAELMMSSGLVCNDSVSWVTFHSAYDFGYLVKILTRRNLPTRLEEFLKTVKXFFGDNVYDVKPMMRFCDTLYGGLDRVARSLNVDRAVGKCHQAGSDSLLTWHAFQKIVDIYFVKEEHRKHAGVLFGL

SEQ ID NO: 11256 - protein, 108 aa, Triticum aestivum
MNRDRWDGNTSAVFPEEEEVFYTVGILRSAVSEGDLGRLEEQNEEILRFCEEAGIPCVQYLPYYAGQAGWEKKHFGPAKWARFVERKRKYDPKAILSRGQRIFTSPLA

SEQ ID NO: 11257 - protein, 113 aa, Rickettsia cooleyi
ANEAVINMLKEIGSSENIPKYIAKAKDKNDPFRLMGFGHRVYKSYDPRAAVLKETCKEVLKELGQLENNPLLQIAIELEAIALKDEYFIERKLYPNVDFYSGIIYKAMGIPSQ

SEQ ID NO: 11258 - protein, 389 aa, Rickettsia sp. RF2125
TNGNNNDSEFAELKIRGKIFKLPILKASIGEDVIDISRVSSEADCFTYDPGFMSTASCQSTITYIDGDKGILRHRGYDIKDLAEKSDFLEVAYLLIYGELPSIEQYNNFTKQVAHHSLVNERLHYLFQTFCSSSHPMAIMLAAVGSLSAFYPDLLNFKEADYELTAIRMIAKIPTIAAMSYKYSIGQPFIYPDNSLDFTENFLHMMFATPCTKYKVNPIIKNALNKIFILHADHEQNASTSTVRIAGSSGANPFACVSTGIASLWGPAHGGANEAVINMLKEIGSSENIPKYIAKAKDKNDPFRLMGFGHRVYKNYDPRAAVLKETCKEVLKELGQLENNPLLQIAIELEAIALKDEYFIERKLYPNVDFYSGIIYKAMGIPSQMFTVL

SEQ ID NO: 11259 - protein, 362 aa, Populus tremula x Populus tremuloides
MSKSPEEEHPVKAFGWAARDQSGHLSPFNFSRRATGEEDVRFKVLYCGICHSDLHSIKNDWGFSMYPLVPGHEIVGEVTEVGSKVKKVNVGDKVGVGCLVGACHSCESCANDLENYCPKMILTYSSIYHDGTITYGGYSDHMVANERYIIRFPDNMPLDGGAPLLCAGITVYSPLKYFGLDEPGKHIGIVGLGGLGHVAVKFAKAFGSKVTVISTSPSKKEEALKNLGADSFLVSRDQEQMQAAAGTLDGIIDTVSAVHPLLPLFGLLKSHGKLILVGAPEKPLELPAFSLIAGRKIVAGSGIGGMKETQEMIDFAAKHNITADIEVISTDYLNTAMERLAKNDVRYRFVIDVGNTLAATKP

SEQ ID NO: 11260 - protein, 347 aa, Escherichia coli CFT073
MELVRSKVMKSILIEKPNQLSIIEREIPTPSAGEVRVKVKLAGICGSDSHIYRGHNPFAKYPRVIGHEFFGVIDAVGEGVESARVGERVAVDPVVSCGHCYPCSIGKPNVCTTLAVLGVHADGGFSEYAVVPAKNAWKIPEAVADQYAVMIEPFTIAANVTGHGQPTENDTVLVYGAGPIGLTIVQVLKGVYNVKNVIVADRIDERLEKAKESGADWAINNSQTPLGESFAEKGIKPTLIIDAACHPSILKEAVTLASPAARIVLMGFSSEPSEVIQQGITGKELSIFSSRLNANKFPVVIDWLSKGLIKPEKLITHTFDFQHVADAISLFELDQKHCCKVLLTFSE

SEQ ID NO: 11261 - protein, 140 aa, Brassica napus
  misc_feature (11)..(12): Xaa can be any naturally occurring amino acid
  misc_feature (28)..(28): Xaa can be any naturally occurring amino acid
  misc_feature (32)..(32): Xaa can be any naturally occurring amino acid
  misc_feature (35)..(35): Xaa can be any naturally occurring amino acid
  misc_feature (39)..(39): Xaa can be any naturally occurring amino acid
  misc_feature (46)..(47): Xaa can be any naturally occurring amino acid
  misc_feature (52)..(52): Xaa can be any naturally occurring amino acid
  misc_feature (54)..(54): Xaa can be any naturally occurring amino acid
  misc_feature (58)..(60): Xaa can be any naturally occurring amino acid
  misc_feature (64)..(64): Xaa can be any naturally occurring amino acid
  misc_feature (72)..(72): Xaa can be any naturally occurring amino acid
  misc_feature (75)..(75): Xaa can be any naturally occurring amino acid
  misc_feature (78)..(78): Xaa can be any naturally occurring amino acid
  misc_feature (81)..(82): Xaa can be any naturally occurring amino acid
  misc_feature (85)..(85): Xaa can be any naturally occurring amino acid
  misc_feature (87)..(87): Xaa can be any naturally occurring amino acid
  misc_feature (90)..(91): Xaa can be any naturally occurring amino acid
  misc_feature (93)..(93): Xaa can be any naturally occurring amino acid
  misc_feature (97)..(98): Xaa can be any naturally occurring amino acid
  misc_feature (102)..(102): Xaa can be any naturally occurring amino acid
  misc_feature (105)..(105): Xaa can be any naturally occurring amino acid
  misc_feature (107)..(109): Xaa can be any naturally occurring amino acid
  misc_feature (111)..(111): Xaa can be any naturally occurring amino acid
  misc_feature (113)..(113): Xaa can be any naturally occurring amino acid
MASSMLSSAAXXTSPAQGTMVAPFTGLXSSAXFPXTRKXNNDITFXXSNGRXVXCMKXXXPVGXKKIENLSXLSXLTXMNXXKGXDXPFXXKXVSCXXIQMXHGXFXXXGXGXTPPILIGVLKGNFLGRADGGQKGKTKF

SEQ ID NO: 11262 - protein, 282 aa, Glycine max
MESKPHVLMHRYELGRLLGQGTFGKVYYARSTITNHSVAIKVIDKDKVMKTGQAEQIKREISVMRLARHPNIIQLFEVLANKNKIYFVIECAKGGELFNKVAKGKLKEDVAHKYFKQLINAVDYCHSRGVYHRDIKPENILLDENGNLKVSDFGLSALVDSKRQDGLLHTPCGTPAYVAPEVIKRKGYDGTKADIWSCGIVLFVLLAGYLPFHDPNLIEMYRKISKAELKCPNWFPPEVCELLGMMLNPNPETRIPISTIRENSWFKKGQNIKNKRPVENNT

SEQ ID NO: 11263 - protein, 181 aa, Acinetobacter sp. ADP1
MSQSIYHIPVQTISGQDTSLDTYRGKVLLIVNVASKCGLTPQYEGLEKLYQDKQQQGLEILGFPANNFLEQEPGSNDEIQQFCSLTYDVHFPLFGKISVAGEDKHPLYQTLIEAQPERIGEGPWWKDLVDYGLTPNPKPEVLWNFEKFLINKNGEVVARFAPDITADDPRLVDAINAELAK

SEQ ID NO: 11264 - protein, 442 aa, Mycobacterium avium subsp. paratuberculosis str. k10
MPALLWFRRDLRLHDHPALSAAADSDEVLACFVLDPRLQRSSGPRRLQFLGDSLRVLRDELDGRLLVTRGRPDIRIPEIAKAIGASSVHVSEDFTPFGKRRDARVRAALASVPLVATGSPYLVAPGRVTKPDGSPYQVFTPFLRRWRDTGWRPPVKTGAASARWLDPARLGITDCEIPDPGATLDLAAGEEAARNKWKSFVDNGLANYADDRHRPDIEGTSRMSAHLKFGTIHPRTLVADLDLRAAAARAYLRELAFRDFYADVLHHRPASAWRNWNSAFDAIRTDTGAEAGRRFAAWKAGETGFPFVDAGMRQLRQTGFMHNRVRMTVASFLVKDLHLPWQWGAHWFLQQLVDGDLANNQHGWQWCAGCGTDAAPYFRVFNPAAQGEKFDPSGDYIRRWVPELRCADDPHLRTGERPPGYPAPIVDHATERAEALRRYRSM

SEQ ID NO: 11265 - protein, 135 aa, Brassica napus
MGGGGRVMATAAKVAGIGVAKGGFRGGLGVPAAANDQFNVRSTSAAKPVSASLSSAIHPSAEADAMVLQRASWEDDWEFAEVETTTIPRVVFSKPPSLQEAKEATDDLKDAINLVYTEGSYEAGSVSRMLSSFHL

SEQ ID NO: 11266 - protein, 326 aa, Glycine max
  misc_feature (303)..(303): Xaa can be any naturally occurring amino acid
MEQSVLDDIINRLLEVRTRPGKQVQLSESEIRQLCVVSREIFLQQPNLLELEAPIKICGDVHGQYSDLLRLFEYGGLPPEANYLFLGDYVDRGKQSLETICLLLAYKIKYPENFFLLRGNHECASINRIYGFYDECKRRFNVRLWKTFTDCFNCLPVAARVDEKILCMHGGLSPDLNNLDQIRNLQRPTDVPDTGLLCDLLWSDPSRDVQGWGMNDRGVSFTFGADKVSEFLQKHDLDLICRAHQVVEDGYEFFANRQLVTIFSAPNYCGEFDNAGAMMSVDETLMCSFQILKPADKKAKLHXGSTTTAKPGNSPAGVKCFLGAKV

SEQ ID NO: 11267 - protein, 157 aa, Lactococcus lactis subsp. lactis Il1403
MNFYDFSAFKMNGETVSMSDFKGKVVIVVNTASKCGFTPQFEGLEKLYENYKDQGLEILGFPCNQFVNQDAGENSEINEFCQLNYGVTFPMFQKIKVNGKEAHPLYQFLKKEAKGALSGTIKWNFTKFLIDREGNVIERFAPKTEPKEMEEEIQKLL

SEQ ID NO: 11268 - protein, 183 aa, Pyrus pyrifolia
MASSMISSGTVATVSADRPAPAQARMVAPFNGLKSSSAFPVTRKSNDITSIASNGGRVQCMQVWPPLGLKKFETLSYLPPLSSESLAKEVDYLLRKNWVPCLEFELETGFVYRENHRSPGYYDGRYWTMWKLPMFGCTDSSQVLKELEEAKKAYPQSFIRIIGFDNVRQVQCISFIAYKPAGF

SEQ ID NO: 11269 - protein, 501 aa, Burkholderia cepacia R18194
METNEHFPLLDATRAFLAKPKKMLIGAEWSDAASGRQLDVVNPADGTVLARVPEADAHDVQQAVAAARRAFDAGPWRTAKTTDRERLLLTLADLIEANARELAEIESLDNGKPVMVAQGLDVAMAAQCFRYMAGWATKIEGSVIDAGMPYMPDSEIFTYTRKEPVGVVGAIIPWNFPLLMAAWKLAPALATGCTVVLKPAEDTPLSALRLGELIREAGFPDGVVNIVTGYGHTAGAALSSDPRIDKIAFTGSTQTGKTIGHAALDNMTRMSLELGGKSPVIVLPDVDPDKAALGVANAIFFNQGQVCTAGSRAYIHAKVFDDVIERVAKIAASLKIGPGMDPSTQIGPLVSAKQRQRVCGYIDSGFGEGARAAAGGRAVDGPGFFVEPTVLVDTTQAMRVVREEIFGPVLVAMPFDDVDTAVQLANDTPYGLGASIWSNDLSAIHKLIPRIAAGTVWVNCHSLLDNAMPFGGMKQSGFGRELGRAVIDQYTESKSVMMNYA

SEQ ID NO: 11270 - protein, 315 aa, Mesoplasma florum L1
MSAEFNWFPGHMNKTLKNIEEKIPVVDLVIEILDARAPYSSRNLTFSKILKNKPILYVLSKADIADPNITKEWVEFYEKKNNTVMVLDDKQKNIVKPLIDLINKATKEKQEKDKAKGMVNSLINVLVIGIPNVGKSTFINRLIKNKSVKAGNKPGLTRGIQLIHLSQFISLLDTPGVLPAKLENETVATNICAINSIKEDVYPKERVAGKLMQYLFNHYEGLIENHYKISPRLQRPIQITDTFIIFEMIAKVRKWYMNDDLLDYDRVIDAFMRDIIANEFNKVSFERILEVVPEEMEKASKIKNEKAIEDISDLW

SEQ ID NO: 11271 - protein, 429 aa, Methylococcus capsulatus str. Bath
MSNFAKLELNESVVEVPVIEGTEGEKAIDITKLRAQTGYITLDPGYGNTGSCLSAITFIDGEQGILRYRGIDIAELCEKSTFVEVSYLLIYGQLPTVEQYARFKEKIHHHSLIHEDMKSFFTSYPGHAHPMAILSSMVCSLSVYHPELLKPDQTIDERDETISRLLSKVRVLAAFAYKRSVGEAFVYTRPELDYISNFLHMMFTRPMRGYVPDELIRKVLDVLFILHADHEQNCSTSTVRMVGSSKANLFAAISAGICALWGPLHGGANQAVIEMLEEIHRAGGCYKKYIERAKDKNDPYRLMGFGHRVYKSYDPRAQILKKYCDEVLNYLGIDDPILEIAKGLEEVALTDPYFIERKLYPNVDFYSGIIYRALKIPTNMFTVMFALGRLPGWIAHWKEMLEDPGMRIARPRQIYIGERQRPYVPIAQR

SEQ ID NO: 11272 - protein, 321 aa, Hydrangea macrophylla
MAFTIPEVPLSSGGRKMPVLGLGTAADPPVDPETVRKAVTEALKLGYRHFDTAALYNSEQPLGDAIAEALGEGLIKSRDELFITSKLWCSDAHRENVEPALQKTLKNLKLEYIDMYLIHWPVSSKPGNYEYPIKKEDFLQMDYKSVWEAMEECQKLGLTKAIGVSNFSCKKLSDVLANAKVPPAVNQVEVNPCWQQKQLTEFCKSNGILVVAYAALGAVGTFYGTNRVMGSEVLNEIARIRGNTVAQVCLRWAYEQGIGVLVKSFNKERMEQNLQIFNWTLSDDESKKISEIPQGRACLGTDYTSVHGPFKTIEELWDGEF

SEQ ID NO: 11273 - protein, 161 aa, Paxillus involutus
VVLIGDSGVGKSNLLSRFTRNEFNLDSKSTIGVEFATRSINVDSKTVKAQIWDTAGQERYRAITSAYYRGAVGALLVYDISKHATYVNVTRWLKELRDHADSNIVIMLVGNKSDLKHLRAVPTEEAKNFSAENELSFIETSALDASNVESAFQTILTDVYR

SEQ ID NO: 11274 - protein, 324 aa, Hydrangea macrophylla
MASNYSNIPEVSMSSSSRKIPIVGLGTATFPPVGSKTVVAAVLQAIQIGYRHFDTASVYQTESDLGEAIAEALRLGLIKSREELFTTSKLWCSDAHAQHVVPTLQKTLKNLNLDYLDLYLVHWPVSVKHGTYDYPIKTEDIIPMDYESVWGAMEECHKLGLAKAIGVSNFSCKKLGHLLSFAKIPPAVNQVEMNPVWQQRKLVEFCKENGVLVGAFSPLGALGTSWGSNNVMESEILKEIAKAKGKTVAQVSLRWAYEQGVIVLVKSYRAERMQENLGIFDWELSDEDTKKIREIPQRRVHRGEEFISENGPFKSIEEFWDGEL

SEQ ID NO: 11275 - protein, 162 aa, Zea mays
LQAVIKRLMTDVPFGVLLSGGLDSSLVASVASRHLNETKVDRQWGNKLHTFCIGLKGSPDLKAAREVADYLSTVHHEFHFTVQEGIDALEEVIYHIETYDVTTIRASTPMFLMSRKIKSLGVKMVISGEGSDEIFGGYLYFHKAPNKKEFHEETCRKVKIFL

SEQ ID NO: 11276 - protein, 161 aa, Paxillus involutus
VVLIGDSGVGKSNLLSRFTRNEFNLDSKSTIGVEFATRSISVDGKTVKAQIWDTAGQERYRAITSAYYRGAVGALLVYDISKHATYVNVTRWLKELRDHADSNIVIMLVGNKSDLKHLRAVPTEEAKNFSTENELSFIETSALDASNVESAFQTILTDVYR

SEQ ID NO: 11277 - protein, 165 aa, Oryza sativa (japonica cultivar-group)
MSSEQQASAGQPVLCASGCGFYGNPATLDMCSVCYRQHCLLNGATMATGPSSSVAAASAATVATGAVTSDSCSVPSAEVNGAAFSSKNNPEPATVVEKKAPANRCASCKKKVGLLGFACRCGATYCGTHRYPEKHACGFDFKGASRDAIARANPLIKGEKLTNKI

SEQ ID NO: 11278 - protein, 283 aa, Triticum aestivum
  misc_feature (86)..(86): Xaa can be any naturally occurring amino acid
MSVVSLLGVNVLQNPARFGDPYEFEITFECLETLQKDLEWKLTYVGSATSNDHDQELDSLLVGPIPVGVNKFIFVADPPDTNKIPXAEILGVTVILLTCAYDGREFFRVGYYVNNEYDSDELNTDPPAKPILEKVRRNILAEKPRVTRFAIKWDSDDSAPPLYPPEQPEADLVADGEEYGAEEAEDEDEEESADGPEVPADPDVMIDDSEAAGAMVETVKATEEESDAGSEDLEAESSGSEEDEIEEDEEREDEPEEAMDLDGAGKRNAAISSSNNTDTTMAH

SEQ ID NO: 11279 - protein, 170 aa, Campylobacter jejuni subsp. jejuni NCTC 11168
MKNNPYIIWLTGLAGSGKTTIGQALYEKLKLKYKNLIYLDGDELREILGHYAYDRQGRIDMALKRAKFAKFLNDQGMMVIVTTISMFNEIYDYNRKQLKNYYEIYIECDMHELIQRDQKGLYTKALNKEIDNVVGVDIEFDKPEADLVINNSCRNNLEEKVELIIKKLAL

SEQ ID NO: 11280 - protein, 489 aa, Burkholderia fungorum LB400
MPEVARFLDAGPLGGVIDGRDEQAADGATFETLDPGTGEHLATVAAMGPADVDRAVDAARRAFARSGWATMHPNDRAIWLHRLADEVERRKAIIGQIEALDAGKIEQQAQGDVQSFVDTLRYFNELALNTERRSALPVSGYEAWTTRQPWGACGFIVPWNFPMVLIGWNISPALAAGNTVVIKPAEDTPLSAIYLARLAREIGFPDGVINVVTGLGEIAGAALSRHPGLRRMSFTGSPEVGRMVAEACGRNLVPCKLELGGKGAAVIFDDVNIEETADKLARAITFHTGQVCCDATRWLVHESIFERFVDASVAALQRTKIGYQLDPGAEMGPVVSAKQRERVLGYLERGQRDGARAVLKGGAVDVAGHDGFYVSPALLAGSLENVAAREEIFGPVAFLAPFRDEAQAVELANDTDYGLANSVWSHDPRRASRVAEAMVAGNSWINAHNLFPLGVPYAGVNRSGMGGGVNSVETLFDYWRSQSMVRPTR

SEQ ID NO: 11281 - protein, 511 aa, Oryza sativa (japonica cultivar-group)
MAMPCRLHGDILLLLLGAVAVAVAHPAANEFCAAVGGGSGGCGVGGGGGGDGRRILIRGGTVVNAHRVEEADVYVEDGVIVAVRPNIPVGDDHVKVIDATGKYVMPALAGGTTMHIDFVIPVNGNLTAGLESYKQKAEKSAMDYGFHMAITKWNDDVSREMETMVKEHGINSFKFFMAYKGSLMVTDDLLLQGLQKCKSLGALAMVHAENGDAVAEGQQRMIDLGITGPEGHALSRPPVLEGEATARAIRLAKFVNTPLYVVHVMSIDAMDEIAKAKREGQRVIGEPVVSGLVLDDSWLWDPDFMIASKYVMSPPIREAGHNKALQVALSSGILQLVGTDHCTFNSTQKAFGSDDFRKIPNGVNGIEERMHIIWDSMVETGRISVSDYVRVTSTECAKIFNIYPRKGAILEGSDADIIILNPERSFVMGAHTHHSRSNTNVYEGRKGKGMVEVTISRGRVVWEDGILNVVPGSGRYVRTPPYSYLFDGIEKSDAAYRASLRAPVKRGKAAA

SEQ ID NO: 11282 - protein, 371 aa, Saccharomyces cerevisiae
MFRSVATRLSACRGLASNAARKSLTIGLIPGDGIGKEVIPAGKQVLENLNSKHGLSFNFIDLYAGFQTFQETGKALPDETVKVLKEQCQGALFGAVQSPTTKVEGYSSPIVALRREMGLFANVRPVKSVEGEKGKPIDMVIVRENTEDLYIKIEKTYIDKATGTRVADATKRISEIATRRIATIALDIALKRLQTRGQATLTVTHKSNVLSQSDGLFREICKEVYESNKDKYGQIKYNEQIVDSMVYRLFREPQCFDVIVAPNLYGDILSDGAAALVGSLGVVPSANVGPEIVIGEPCHGSAPDIAGKGIANPIATIRSTALMLEFLGHNEAAQDIYKAVDANLREGSIKTPDLGGKASTQQVVDDVLSRL

SEQ ID NO: 11283 - protein, 495 aa, Burkholderia cepacia R18194
MRAQNKFKTGLDIAKYTAKIMRADMAAYDADPAKYTQSLGCWHGFIGQQKMISIKKHFNSTERRYLYLSGWMVAALRSEFGPLPDQSMHEKTSVSALIRELYTFLRQADARELGGLFRELDAAKDATAKAAIQDKIDNHVTHVVPIIADIDAGFGNAEATYLLAKQFIEAGACCIQIENQVSDEKQCGHQDGKVTVPHEDFLAKIRAIRYAFLELGVDDGIIVARTDSLGAGLTKQIAVTSTPGDLGDQYNAFLDCEELSADQLGNGDVVIKRDGKLLRPKRLPSNLFQFRAGTGEARCVLDCITSLQNGADLLWIETEKPHIAQIGGMVSEIRKVIPNAKLVYNNSPSFNWTLNFRQQAYDALKAEGKDVSAYDRAQLMSVEYDETELAKLADEKIRTFQADAAREAGIFHHLITLPTYHTAALSTDNLAKEYFGDQGMLGYVAGVQRKEIRQGIACVKHQNMSGSDIGDDHKEYFSGDAALKAAGKDNTMNQF

SEQ ID NO: 11284 - protein, 73 aa, Brassica napus
MAFPSCVQCGTRQNPCRCKVVGPTLGFVAFLVTGVIEWPVGAVVYIFKHSKGRRIMGHPATVVYPKVSRSIPI

SEQ ID NO: 11285 - protein, 490 aa, Saccharomyces cerevisiae
MEATSSALSSTANLVKTIVGAGTLAIPYSFKSDGVLVGVILTLLAAVTSGLGLFVLSKCSKTLINPRNSSFFTLCMLTYPTLAPIFDLAMIVQCFGVGLSYLVLIGDLFPGLFGGERNYWIIASAVIIIPLCLVKKLDQLKYSSILGLFALAYISILVFSHFVFELGKGELTNILRNDICWWKIHDFKGLLSTFSIIIFAFTGSMNLFPMINELKDNSMENITFVINNSISLSTALFLIVGLSGYLTFGNETLGNLMLNYDPNSIWIVIGKFCLGSMLILSFPLLFHPLRIAVNNVIIWIEITYGGANPEEDPQVSEYTRASNLRPISMTVEDPAQPSDALDATSYNEQECLLPNGNFDNGSIESQENNNDERGTMAVAGDNEHHAPFVKSRFYWITALLLISMYTLALSVQSFALVLSFVGATGSTSISFTLPGLLGYKLIGLDSLAIGKMIPPKDRFYKRCSLLLVFYGLSVMFLSLYVTVFNRSDEA

SEQ ID NO: 11286 - protein, 449 aa, Zea mays
MYRAKRAALSPKVKRRVGKYELGRTIGEGTFAKVRFAKNTENGEPVAIKILDKEKVKRHRLVEQIKREICIMKLVRHPNVVRLFEVMGSKARIFIVLEYVTGGELFEIIATNGRLKEDEARKYFQQLINAVDYCHSRGVYHRDLKLENLLLDAAGNLKVSDFGLSALTEQVKADGLLHTTCGTPNYVAPEVIEDGGYDGATADIWSCGVILFVLLAGYLPFEDDNIIALYKKISAAQFSCPSWFSAGAKNMITRILDPNPTTRITISQILEHPWFKKGYKPPVFDEKYQTSLDDVDAAFGDSEDRHVKEETEDQPTSMNAFELISLNQALNLENLFEAKEEYKRETRFTSQCPPKEIITKIEEAAKPLGFDVQKKKYKMRMENPKAGRKGNLNVATEVFQIAPSLHVVELKKAKGDTLEFQKFYRSLSTQLKDVVWKCDGEVDGNSAAA

SEQ ID NO: 11287 - protein, 619 aa, Zea mays
  misc_feature (26)..(26): Xaa can be any naturally occurring amino acid
MDSDYGVPRELSEVQKKRTLYQPELXPPCLQGTTVRVEYGDAAIAADPAGAHVISHAFPHTYGQPIAHFLRKTAVVPDAKVISEHQAVRVGIVFCGRQSPGGHNVVWGLYEAIKAHNQNSKLIGFLGGSDGLLAQRTLEITDKVIASYKNQGGYDMLGRTKDQIRTTEQVNGAMASCQALKLDALVIIGGVTSNTDAAQLAETFAEAKCATKVVGVPVTLNGDLKNQFVETTVGFDTICKVNAQLISNVCTDALSAEKYYYFIRLMGRKASHVALECALQSHPNMVILGEEVAASKLTIFDITKQICDAVQARAEKDKNHGVILIPEGLVESIPELYALLQEIHGLHGKGVSVENISSQLSPWASALFEFLPPFIRKQLLLHPESDDSAQLSQIETEKLLAQLVETEMNRRLKEGTYKGKKFNAICHFFGYQARGALPSKFDCDYAYVLGHVCYHIIAAGLNGYMATVTNLKNPVNKWRCGATPISSMMTVKRWSRGPSATQIGKPAVHMASVDLKGKAYDVLRQNSSSFLLEDVYRNPGPLQFEGPGADSKPISLCVEDQDYMGRIKKLQEYLEKVKRIVKPGCSQDVLKAALSAMSSVTETLNIMTSSSTGQTPLSH

SEQ ID NO: 11288 - protein, 318 aa, Burkholderia cepacia R18194
MLEPEIAAFVAAVDAWYPADAAARSPGEQRRLYDRFAAEWTPAALPAGIVQQDAVWHAPDGHKIALRRYTSAHGTPRGTVLFFHGGGFVVGSLDSHALITAQLAADTGLDVIAVDYRLAPEHRAPAALEDCLDVTRAARDARWPFGPCVHPLTLAGDSAGGMLAAAVVTALRDAGEGGIDGIALVYPMLGFEPQSPARETEAHAPMLTLDDVHRYRALYWEGGLSDALGDGNPLLHASVPLAASRFDGLPPVLAIGAEHDPLRDDARVYVERIRAARGVAHYWMGEGLVHGCWRALGTSPQAALMHRTVGGFLLAPHA

SEQ ID NO: 11289 - protein, 164 aa, Brassica napus
MPALACVDTYTTDVFIPPSPQPSSTAAVVDTWSPSLSSSLYRIDGWGAPYFSANSSGNISVRPHGSNTLPHQDIDLLKLVKKVTDPKQTGGLGLHLPVIVRFPDVLKNRLECLQSAFDFAVQSQGYESHYQGVYPVKCNQDRFVVEDIVRFGSQFRFGLEAGSN

SEQ ID NO: 11290 - protein, 181 aa, Brassica napus
MASSMLSSAAVVTSPAQATMVAPFTGLKSSSAFPVTRKANNDITSIVSNGGRVSCMKVWPPVGKKKFETLSYLPDLTEVELGKEVDYLLRNKWIPCVEFELEHGFVYREHGSTPGYYDGRYWTMWKLPLFGCTDSAQVLKEVQECKTEYPNAFIRIIGFDNNRQVQCISFIAYKPPSFTGA

SEQ ID NO: 11291 - protein, 164 aa, Methylococcus capsulatus str. Bath
MNIYEFEVRTLEGETVRLDGYRGKVLLIVNVASRCGFTPQYAGLEALYRRHRNAGLVILGFPCNQFGGQEPGSETEIRRFCSSRYEVSFPLFAKIEVNGEHTHPLYAYLKSAQPGLLGSEAIKWNFTKFLVGRNGEVVKRYAPTATPESIEPGLLPLLTVGSGG

SEQ ID NO: 11292 - protein, 370 aa, Zea mays
  misc_feature (76)..(76): Xaa can be any naturally occurring amino acid
MRRRRMGALHVVGEPRISFRQQPAAVVAKNGGHGAVVEEIHGLIRVYKDGHVERLPAIPAVPCTWGGTAPGRAGRXVARDVVVDPATGVWARLYAPTSAGDGARRPVVVYFHGGGFCVGSAAWSCYHEFLAQLAARAGCAVMSVDYRLAPEHRLPAAFDDGLAAVRWLRHQAAASASASACCNDDLSWWRARCGFDRVFLMGDSAGASIALHVAARLGQGQLGALPPLTVRGPVLIQPFLGGEGRTASEKNVAQPPRSALTLATSDCYWRLALPAGASREHPWCNPLSGRAAPRLETTPLPPLLVCVSETDILRDRNLELCRALREAGKRVEQAVYGGVGHAFQVLHNCHLSQPRTQEMLAHIKAFVSAR

SEQ ID NO: 11293 - protein, 432 aa, Chromobacterium violaceum ATCC 12472
MTTREQRIAAIQKDWDENPRWKGIKRGYSAADVERLRGSLQVEHSLARHGAEKLWQLVNNEPYINCLGALTGGQAMQQVKAGVKAIYLSGWQVAADNNEYSAMYPDQSLYPVDSVPKVVERINNAFTRADEIQHAKGLDKGDKGYVDYFAPIVADAEAGFGGVLNAYELMKAMIRAGAAGVHFEDQLASVKKCGHMGGKVLVPTQEAIQKLIAARLAADVYGVPTLVIARTDAEAADLLTSDVDPNDEPFLTGERTAEGFYKTKKGLEQAISRAVAYADYADLVWCETGTPDLEFARKFAEAVHAKHPGKLLAYNCSPSFNWKKNLDDATIAKFQRELGAMGYKYQFITLAGIHSMWFNMYDLAQDYVARGMSAYVEKVQEPEFAARDRGYSFVSHQQEVGTGYFDDVTTVIQGGTSSVTALTGSTEEEQFH

SEQ ID NO: 11294 - protein, 531 aa, Zea mays
  misc_feature (305)..(305): Xaa can be any naturally occurring amino acid
MPGILYQLVVAAAICALSSGSIAVASGLNATDSFLVCLVGAGVPPRLLQTPASPSYSATLLSSVRNLRYVTSDIQRPVAIVAATEPAHAQAAVRCGRRHGVRVRARSGGHDYEGLSYASLDPRERFAVLDLAAFRDVRVDSARAEAWAGSGATLGEVYYAVAAASRVLAFPAGICPTVGVGGHLSGGGFGTLMRRYGLAADNVIDAVLVDADGRLLNRTTMGEDLFWAIRGGGGESFGVILSWKLRLVRVPETVTVFTVRRSINQSASQLITKWQAIAPALPSDLILRVAVRSQPARFEALFLGXAARLLEHMRAHFPDLGVTQSDCEEISWIQSTVYFAFYSSSKPLELLLDRSGETPRYVKAKSDYVQEPIPRHVWERTWSWLEKPEAGLLILDPYGGRMGSISPSATPFPHRKGNLYNLQYYSYWFENGTAALEKRMSWVRGLYEEMEPYVSKNPRTGYVNYRDLDLGTNELEDNVTSYARARIWGEKYFKGNFERLAAVKAMADPDDFFRNEQSIPPLPAAKGWGFI

SEQ ID NO: 11295 - protein, 205 aa, Triticum aestivum
GVSKVLLLLSAYLDHKVQENEELLDSSKTKAARGIFHGQRVPELSIKLYAERIFKYAKCSPSCFVLGLIYIERYLQQPNIYMTSFSVHRLLIASVVVAAKFIDDAFFNNAYYGRVGGITTREMNMLELDLLFSLDFRLKVDIETFGSYCLQLEKEALVLVLERPIQVQAANVTKHLICNSSADETCKHELVRERYSSQAVHGCSW

SEQ ID NO: 11296 - protein, 368 aa, Malus x domestica
MGKGGQSCNGVVRDAKPVEQENMAAWLVDVNTIKILPFKLPAIGPNDVRIRIKAVGICGSDIHYLKTMKCGDFQVKDPMVIGHECAGIVDKVGSEVKHLVPGDRVAVEPGISCARCQQCKGGRYNLCPDMKFFATPPVHGSLANQIVHPADLCFKLPENVSLEEGAMCEPLSVGVHACRRANVDPETTVLIIGAGPIGLVSVLAARAFGAPRIVIVDMDDKRLAMAKSLGADEAVKVSTKMEDLDDEVAEIKEAMISEVDVTFDCVGFNKTVSTGLNATRPGGKVCLVGMGHGVMTVPLTPAAAREVDVVGVFRYQKTWPLCLEFLRSGKIDVKPLITHRFGFTEKEVEEAFATSARGGNAIKVMFKL

SEQ ID NO: 11297 - protein, 245 aa, Zea mays
MDKPVAPGIIKEELLEQQPPTQDGVGGGGDAPRPMEGLHEVGPPPFLTKTFDLVEDPATDAVLSWSRAGNSFIVWDPHVFADGLLPRLFKHSNFSSFVRQLNTYGFRKVDPDRWEFANEGFLRGQRHLLKMIKRRKPPSAVAPLRQQRAPASCLEVGEFGFEEEIDRLKRDKNILITEVVKLRQEQQSTKDHVRAMEERLRVAEQKQVQMMGFLARAMRNPEFFQQLAQQQDKRKELEDTKKKKK

SEQ ID NO: 11298 - protein, 200 aa, Nicotiana tabacum
MAFAGTTQKCMACDKTVYLVDKLTADNRIYHKACFRCHHCKGTVKLGNYNSFEGVLYCRPHFDQLFKQTGSLDKSFEGTPKIVKPQKPIDSEKPQVAKVTSMFGGTREKCFGCKKTVYPTEKVSANGTPYHKSCFQCSHGGCVISPSNYTAHEGRLYCKHHHIQLIKEKGNLSKLEGDHEMNSTTTTEVTAESYTADQVD

SEQ ID NO: 11299 - protein, 488 aa, Pseudomonas fluorescens PfO-1
MIQTETDMQLIWLRSDLRQHDNTALAAAAERGPSVAVYLLSPQQWQEHDDAPCKIDFWLRNLHKLSKSLGDLNIPLLIRTAPHWDQAPAVLLELCRQLKIEAVHVNEEYGINESRRDAAVAKALQAEGITFHSYLDQLLFKPGSVLTRTGTYFQVFSQFRKVCYEHLHRSMPSLKQAPGKQSALNIASDPVPEAIEGFPTPGASLRALWPAGETEARRRLDTFADAQIDYYKSERDFPAKPGTSQLSAYLAAGVISPRQCLHAALQSNQGEFESGKVGAVTWINELLWREFYKHILVGYPRVSRHRAFRPETEDLAWRNAPEDLAAWQEARTGLPIIDAAMRQLLETGWMHNRLRMVVAMFLTKNLLIDWREGERFFMRHLIDGDLAANNGGWQWSASTGTDSAPYFRIFNPVSQSEKFDSEGLFIKHWLPELAGLNKKEIHNPASVGGLFGVADYPAPIVNLSASRERALAAFKNLPSRSSQGESDE

SEQ ID NO: 11300 - protein, 303 aa, Aspergillus nidulans FGSC A4
MEETRVNLLEYLRSKTQVDLDTFDITGISFPRLLEHTLNLETVAAGLHDQFPEVTFDELGVEVGAVLLAGEMVPAFTGNLHLMVNPSYAYSREKVIEAAKSTPSPISLYPVLPATWEGLQACRDLQAFKIKTLGTTLFSMEQAILAGEAGCVSISPFVHSLRILVDPEYKDPHPVYNLSAQAQRWYRRQSLPTKVKSCSTVGVDELLELAGIDALTIIPDDLRALQSTYRDANQVFKLSIVENGTQNDDKIEHISYINDEEKYRADFQKADEGRAKAKTAEAIDIFCGFQAKAEDVIRKAKGQ

SEQ ID NO: 11301 - protein, 119 aa, Ehrlichia canis str. Jake
MIQKNTLLDVADNSGARKVLCIGLLNGKKSASVGDVIVVSTKVITPRGKVSKGKVYKAVVVRVKKAVRRLDGSIIRFSSNAVVLINDQGDPLGTRVFGPIKKLPFGLFSKVMSLAVEVL

SEQ ID NO: 11302 - protein, 232 aa, Brassica napus
PRVRLRSSFRLLYITRTNLLVRASPSSLSRLPSKFTSAKQLVRSHHQIPLSTTGAKLSRSEHSMAASSEPKSIYDFTVKDAKGNDVDLSTYKGKVLLIVNVASQCGLTNSNYTELAQLYQKYKDHGFEILAFPCNQFGNQEPGSNEEIVQFACTRFKAEYPIFDKVDVNGDSAAPIYKFLKSSKGGLFGDGIKWNFAKFLVDKDGNVVDRYAPTTSPLSIEKDLKKLLGVTA

SEQ ID NO: 11303 - protein, 363 aa, Buchnera aphidicola (Schizaphis graminum)
MKKKFRIAVLPGDGIGPEVMREAYKILNILERKFFLKLELREFDIGGIAIDREGIALPEKTLRGCENSDAILFGSVGGKKWDYLPIESRPERASLLPLRKHFNLFSNLRPAKLRVDLKNLSPLRSDIVRDGFDILCIRELTGGIYFGKPKGRFKNKNGEYAFDTEIYYDFEIERIANLAFELASSRRCKVCSIDKANVLESSVLWREIVKKVSKNYPDVHLSHLYIDNACMQIIKNPTQFDILLCSNIFGDIISDECAMITGSIGMLPSASLNNQKFGLYEPAGGSAPDIEGKNIANPIAQILSLSMLIRYSMNLNEIADKIDLSVHYALKEGYRTLDISDGKNYIKTNEMGDIIAEFLDNGK

SEQ ID NO: 11304 - protein, 386 aa, Aspergillus niger
MATATVLEKANIGVFTNTKHDLWVADAKPTLEEVKNGQGLQPGEVTIEVRSTGICGSDVHFWHAGCIGPMIVTGDHILGHESAGQVVAVAPDVTSLKPGDRVAVEPNIICNACEPCLTGRYNGCENVQFLSTPPVDGLLRRYVNHPAIWCHKIGDMSYEDGALLEPLSVSLAGIERSGLRLGDPCLVTGAGPIGLITLLSARAAGASPIVITDIDEGRLEFAKSLVPDVRTYKVQIGLSAEQNAEGIINVFNDGQGSGPGALRPRIAMECTGVESSVASAIWSVKFGGKVFVIGVGKNEMTVPFMRLSTWEIDLQYQYRYCNTWPRAIRLVRNGVIDLKKLVTHRFLLEDAIKAFETAANPKTGAIKVQIMSSEDDVKAASAGQKI

SEQ ID NO: 11305 - protein, 384 aa, Chloroflexus aurantiacus
MARKHPYEPLPWNDLPSVSWNFVWREPIGVCAQIIPWNYAFCMAAWKLGPALATGNTVVFKPSSLAPLSTLAIFQTIHDLNLLPKGVINLVLGPGGDVGEYLVTHPAVDKVAFTGSTEVGRKIMALAAPHIKRVTLELGGKNAMLILPDADLDLVVDGVLWGAFYHSGQLCEAGSRLLVPHALHDTLVERLVERVRGMRIGDPMDLETDIGPLISERQREKVEYYIAVGREEGATVVIGGGRPIGEAFANGHYVEPTIFTGVRPEMRIAREEIFGPVLSVIAYDEIGEAIRIANDSIYGLAASVWSRDLQHALSVVRRIRAGTVWINEHHVLNPRAPFGGYRQSGFGREMGRYGLDEYTEVKHIHVDLMQRRQGRLWWDTLLPE

SEQ ID NO: 11306 - protein, 476 aa, Pseudomonas syringae pv. syringae B728a
MYPDVQLYIDGQWRASRDNRTLSVINPATGEALGAVAHAGIADLDEALAAAERGFATWRATSAYDRYKLMQKAANLVRERADSIARIMTQEQGKPLAEARMETLSAADIIDWLAEEGRRSYGRLVPSRNVSIEQKVIKEPVGPVAAFTPWNFPINQVVRKLSSALAAGCSIIVKAPEETPASPAELIRAFADAGVPAGVIGLVYGDPAEISGYLIPHPVIRKVTFTGSTPVGKQLAALAGKHMKRATMELGGHAPALVFDDADIDLAARVLATAKFRNAGQVCVSPTRILVQRKVLDAFTEKFVGLTREIKVGNGLEAGTTMGPVANDRRIPALVDLIDDAVRGGATLSAGGKAGEGPGYFFEPTVLSGLKPHMRIMNEEPFGPVALLVPFDTLEEAIAESNRVPFGLASYAFTTSMKTAQALSTYIEAGMLSINHQGIGLPEVPFGGIKDSGYGSEGGTEAIEAYLNTKLVTQYN

SEQ ID NO: 11307 - protein, 245 aa, Glycine max
  misc_feature (50)..(50): Xaa can be any naturally occurring amino acid
MTSASELFHSRRHRLGRSALDLGLDTELNAADSLRRHYHLRRLRHHPGAXASDRIDGRNLREMSIRFFDSEENVRSSLRGSDSERLPVGVVLARARLLQRLRGEPLSTNRQYDRDSFGEDPESESSNEDPSGASLVTELTSQMARSQFLQELSTKPPGLTQEALDCLHQEVFSSNASEIGLDSRVLQDCSICLESFTDGDELIRLPCGHKFHSVCLDPWIRCCGDCPYCRRCIVVNTHSSLNEDE

SEQ ID NO: 11308 - protein, 72 aa, Brassica napus
  misc_feature (64)..(64): Xaa can be any naturally occurring amino acid
MDPMDIVGKSKEDASLPKATMTKIIKEMLPADVRVARDAQDLLIECCVEFINLISSESNEVCNXEDKRTIAP

SEQ ID NO: 11309 - protein, 388 aa, Zea mays
MHSDERLFYKLLIDNVVELLPFVYTPTVGEACQKYGSIFGRPQGLYVSLKDKGKVLEVLRNWPHRNIQVICVTDGERILGLGDLGCQGMGIPVGKLALYTALGGVDPSVCLPITIDVGTNNEKLLNDEFYIGLRQKRATGEEYDELIEEFMSAVKQFYGEKVLIQFEDFANHNAFDLLEKYSKSHLVFNDDIQGTASVVLAGLLAALKMVGGTLAEQTYLFLGAGEAGTGIAELIALEISKQTNAPIEECRKKVWLVDSKGLIVDSRKGSLQPFKKPWAHEHEPLKTLYDAVQSIKPTVLIGTSGVGRTFTKEIIEAMSSFNERPIIFSLSNPTSHSECTAEQAYTWSQGRSIFASGSPFAPVEYEGKTFVPVHAYMIYICCNVVKAN

SEQ ID NO: 11310 - protein, 341 aa, Chromobacterium violaceum ATCC 12472
MKALAKLKAAPGLEMTDVPLPEVGHNDLLIKIVKTAICGTDIHIWNWDEWSQKTIPVPMHVGHEYVGVVAGMGSEVQGFKIGQRVSGEGHITCGYCRNCRAGRRHLCRNTTGVGVNREGAFAEYLVIPAFNAFPIPDDISDDLASIFDPFGNAVHTALSFNLVGEDVLITGAGPIGIMAVAIAKHVGARHVVITDVNDYRLELAKKMGATRAVNVAREDLKAVMQELHMSEGFDVGLEMSGNPQAFRQMLETMNHGGKVALLGIPPSNTAIDWNQVIFKGLEIKGIYGREMFETWYKMVALIQSGLDISPIITHHFKVDEFEQGFAAMLSGQSGKVILDWR

SEQ ID NO: 11311 - protein, 405 aa, Zea mays
MKPPSLVHCFKLLVLLALARLTMHVPDEDMLSPLGALRLDGHFSFHDVSAMARDFGNQCSFLPAAVLHPGSVSDIAATVRHVFSLGEGSPLTVAARGHGHSLMGQSQAAQGIVVRMESLRGARLQVHDGFVDAPGGELWINVLRETLKHGLAPKSWTDYLHLTVGGTLSNAGVSGQAFRHGPQVSNVNQLEIVTGRGDVVTCSPEDNSDLFYAALGGLGQFGIITRARIALEPAPEMARWIRVLYSALESFTEDQEMLIMAENSFDYVEGFVIINRTGVLNNWRASFKPQDPVEASHFQSDGRVLYCLELTKNFNSDDTDTMEQEVTVLLSRLRFIQSTLFHTDVTYLEFLDRVHTSELKLRAQGLWEVPHPWLNLLIPRSSIRRFAKEVFGMTLNDSNNGSILL

SEQ ID NO: 11312 - protein, 490 aa, Novosphingobium aromaticivorans
MGVTIPPLERSDFLTGQPLVDGTEICAGSTYAVTNPATGKTLANVVKLGAAQTRRAIESNSRALIDWRKRPAQERARLLHDWLALVRLHRHDLGLLMTAEQGKPLAEALGEVDYAASFIQWFAEEARRVYGEVIPASADRRIVVIRQPVGVAGAITPWNFPAAMITRKVAPALAAGCTVTLKPSELTPMTAFALAKLAREAGVPPGVFNVVCGDAPEIGSVLTSHPDVTKFTFTGSTAIGKLLTAQCAATLKRVSMELGGNAPLLVFDDADLDQAVEGAIASKFRNTGQTCVCANRILVQSGIHDRFVEALAARVSAFRVGNGLEGATDQGPLITASALAKVQGHVADAVAQGAQLVTGGKRHEAGELFFQPTVLTGARPAMRLADEETFGPVAPVFRFETEAEALALANATHSGLAAYAFTRDIDRAWRVSEGLETGMVGLNSGIVSTETAPFGGIKESGLGREGSRHGIEEFLEMKTISVGVRPESPV

SEQ ID NO: 11313 - protein, 361 aa, Yarrowia lipolytica
MRLAIQAVFLLATLMWLVAAQADFYAVLGLKKGASDKDIKKAYRTLSKKYHPDKNPRNEEAHQTFIEIGEAYEVLSDEEKRGKYDKFGHEGLKNGGGGGTNPFDLFAQFFGGGGGGQRRGVPKGPNTETHIDVSMKRMFKGFDMDLQVNLQGICSSCKGSGSADGVNHKCDGCDGSGVVIQVAQMGMMIQKFQQQCPKCQGKGHLISNPCNKCGGQKVQREDRKYNVYIEPGTPRVHSYSFEEEADKSPDHVAGDLIVQVREAPTENMGYRRRRNDLFRTEALSLKEALHGGWTRKIPFLDEESEVVLSRKKGEPTQHGHIEVIKNHGMPQMGVDDSHGDLYIKYVIVMPMGASSKVRDEL

SEQ ID NO: 11314 - protein, 239 aa, Methanococcus maripaludis S2
MARTKKANDEVATDSDSLKLKVAKQAAKLVKDEMVVGLGSGSTANLFIQELGKRVVEEELYIYGVPTSFDSRMMASNSGIPLISLDQCGEIDIAIDGADEVCKKTLSLIKGGGGCHTMEKIVDYHAKEFVVLADEGKLVESLGDKTAVPLEVIPFAYSTVLNKLLDMNTAPAIRSGSGKMGPVITDNGNMIIDVFINIEDAEETETMLNNIPGVLENGIFSKCDKVLVGTSKKVEILKK

SEQ ID NO: 11315 - protein, 162 aa, Dechloromonas aromatica RCB
MKRRFLIALFIFGSFFGSTAALADAATEAATAADPVAEKRLQKLSEELRCLVCQNQTIADSNAELAQDLRREVRTMIKDGKTDKEIVDFMVVRYGDFVLYRPPVKGITLLLWGGPIVLMLLGLFMLQRYLRRRSTRIDAEDQPLSADDASRADALLKENDQK

SEQ ID NO: 11316 - protein, 291 aa, Saccharomyces cerevisiae
LVHVASVEKGRSYEDFQKVYNAIALKLREDDEYDNYIGYGPVLVRLAWHISGTWDKHDNTGGSYGGTYRFKKEFNDPSNAGLQNGFKFLEPIHKEFPWISSGDLFSLGGVTAVQEMQGPKIPWRCGRVDTPEDTTPDNGRLPDADKDAGYVRTFFQRLNMNDREVVALMGAHALGKTHLKNSGYEGPGGAANNVFTNEFYLNLLNEDWKLEKNDANNEQWDSKSGYMMLPTDYSLIQDPKYLSIVKEYANDQDKFFKDFSKAFEKLLEDGITFPKDAPSPFIFKTLEEQGL

SEQ ID NO: 11317 - protein, 479 aa, Novosphingobium aromaticivorans
MTQIEHWIGGTAVAATGGAYFDDLNPVDDSVYSRVPAGTAEDVNRAVENAHQAYLQHRDLPAAVREGWIAKAAEIMERDTAKFADVLVDEIGSPIAKAGFETRFAVSFLRAAIGVPRRIRGETIPSDTPGRFSMSLRQPVGVVAGITPFNVPLIKGIKQSAMALATGNAFVLLPSEAAPMIADLLAKLWKEAGVPDGLFNVVYGNGAEIGDVLTGHPKVASITFTGSSRVGKHIAEIAARNLKKYTLELGGKSPLVICADADLDKAVNAALFSIFMYQGQVCMGASRIYVERSIFDQFTKAFAAATGRANSGDLRDPTTMLGPIISERQRDRVRRHIDDARSKGAAVLAGGEWSGNSCAATILSGVTAEMTVFEEETFGPVTSLFPFDTLEEALELANNTEYGLSASIFTRDLDKALAFAQRAEAGMVHINAPTLHDEPHVPFGGTKASGFGREGTEADLEIMTEWKWVTIQSATEGGH

SEQ ID NO: 11318 - protein, 336 aa, Bacteroides thetaiotaomicron VPI-5482
MRIGILTSGGDCPGINATIRGVCKTAINHYGMEVIGIHSGFQGLLTKDIESFTDKSLSGLLNQGGTMLGTSREKPFKKGGVVSDVDKPALILQNIQEMGLDCVVCIGGNGTQKTAAKFAAMGVNIVSVPKTIDNDIWGTDISFGFDSAVSIATDAIDRLHSTASSHKRVMVIEVMGHKAGWIALYSGMAGGGDVILVPEIPYNIKNIGNTILERLKKGKPYSIVVVAEGILTDGRKRAAEYIAQEIEYETGIETRETVLGYIQRGGSPTPFDRNLSTRMGGHATELIANGQFGRMIALKGDDISSIPLEEVAGKLKLVTEDHDLVIQGRRMGICFG

SEQ ID NO: 11319 - protein, 192 aa, Zea mays
MSAVNITNVAVLDNPTAFLNPFQFEISYECLVPLDDDLEWKLIYVGSAEDENYDQQLESVLVGPVNVGTYRFVLQADPPDPSKIREEDIIGVTVLLLTCSYMGQEFMRVGYYVNNDYDDEQLREEPPAKVLIDRVQRNILADKPRVTKFPINFHPEPSTGPGQQQQQEPQTTSPENHTGNGEANGSKPEADQ

SEQ ID NO: 11320 - protein, 234 aa, Zea mays
  misc_feature (82)..(82): Xaa can be any naturally occurring amino acid
  misc_feature (169)..(169): Xaa can be any naturally occurring amino acid
LSQVILTAASFNPHLWYRIGQASTDAKRIIDEERANARLEIGSAKASVQKIQSALKEQEKFSHRTGKQDVDELKEEVQEARXMDIENEIQVLCDQLAKKSSDSLRLLKELELHRSYGENDMPLYELKGLETLGSTLHIVVHDCASVDFWNSSIQWFRIQPEGSKKEIIXSTTKPAYAPEPHDVGRYTQAEVKSGGQTSITKTAGSVDPFFSFVAAGLVHYVEALVRRRETGYNV

SEQ ID NO: 11321 - protein, 136 aa, Brassica napus
STLSLSTVGKIDPAAGLGSYVEALVRKHDVDFNVVVTQMSGEDHTSESIHLFHVGKMRIKLCKGKTVIAKEYYSSAMQLCGVRGGGNAAAQAVYWQAKKGVSFVVAFESERERNAAIMLARRFACDCNVTLAGPED

SEQ ID NO: 11322 - protein, 230 aa, Arabidopsis thaliana
MAVSNSLTISPRKLRSDLYSYSYQNNSKTPLVISVLSSLIDRTLTRNERISRRALPSSGAGGKTQIFDCREIPDMTIQSYLGRIFRYTKAGPSVYVVAYVYIDRFCQTNPGFRISLTNVHRLLITTIMIASKYVEDLNYRNSYFAKVGGLETEDLNKLELEFLFLMGFKLHVNVSVFESYCCHLEREVSFGGGYQIEKALRCAEEIKSRQMIIQDPKHHHHHHQLARILL

SEQ ID NO: 11323 - protein, 358 aa, Aspergillus niger
MSTQNTNAQNLSFVLEGIHRVKFEDRPIPEINNPHDVLVNVRFTGICGSDVHYWEHGSIGQFIVKDPMVLGHESSGVVSKVGSAVTSLKVGDCVAMEPGIPCRRCEPCKAGKYNLCVKMAFAATPPYDGTLAKYYVLPEDFCYKLPESITLQEGAIMEPLSVAVHIVKQAGINPGQSVVVFGAGPVGLLCCAVAKAYGASKVIAVDIQKGRLDFAKKYAATATFEPAKAAALENAQRIITENDLGSGADVAIDASGAEPSVHTGIHVLRAGGTYVQGGMGRSEITFPIMAACTKELNVKGSFRYGSGDYKLAVSLVSAGKVNVKELITGVVKFEDAERAFEEVRAGKGIKTLIAGVDS

SEQ ID NO: 11324 - protein, 391 aa, Triticum aestivum
MKTFLVFALLALAAARAVAQISQQQQQPPFSQQQQPPFSQQQQPPFSQQQQSPFSQQQEQQQQPPFLQQQQPPFSQQPPISQQQQPPFSQEQQPPFSQQQQPPFSQQQQPPYSQQQQPPFSQQQQPPFSQQQQPPFSQQQQQTNKQQQQQPFTQQQPPFSQQPPISQQQQQQQQQQQPFTQQQPPFSQQPPISQQQQPPFSQQQQTPFSQQQQIPVIHPSVLQQLNPCKVFLQQQCIPVAMQRCLARSQMLQQSICHVMQQQCCQQLRQIPEQSRHESIRAIVYSIILQQQQQQQQQQQGQSIIQYQQQQPQQLGQCVSQPQQQLQQQLGQQPQQQQLAHGTFLQPHQIAQLEVMTSIALHNLPMMCSVSVPLYETTTSVPLGIGIGVGVY

SEQ ID NO: 11325 - protein, 129 aa, Picrophilus torridus DSM 9790
MSWTEAEVRELKVGRYILIDDSPCRIVDITMSKPGKHGEAKGRIVAIGVFDNQKHSVVYPVKHKVKVPVITKKNAQVLSIANNEVQLMDSETFETFVIPVDPADLEKIKPGMEVPYWEAMGQRKIMLQN

SEQ ID NO: 11326 - protein, 196 aa, Glycine max
  misc_feature (159)..(159): Xaa can be any naturally occurring amino acid
MSESEKQRVTGKVKWFDDQKGFGFITTDDSGEEFFVHQSSIRSDGFRSLALGESVEFLIDSDPEGRTKAVDVTGPDESPVQGTRGGGGGGRGSYGGGGGRGGYGGGGRGGRGGYGGGGGGYGGGGYGGGGGYGGGGGGGGGGGCYKCGETGHIARDCSXQGGGGGGRYGGGGGGGGSCYNCGESGHFARDCPSSAR

SEQ ID NO: 11327 - protein, 81 aa, Glycine max
SVQFIAFDIRFSVLFQSALFNFHSFLTVILLGICACTYFKMQFPAILDQKTGYICLHLAPFVNTDCNSYIVSADVNNVSFK

SEQ ID NO: 11328 - protein, 405 aa, Candida albicans SC5314
MTSMEPADTSIRSLNDINLQELANKQHQRNIYAQGSPTLEDSITSNGNDINNPNNNINKTNNNSNSSLSLTKKTSRHINKDTTTKGKYTLNDFQILRTLGTGSFGRVHLTRSIHNGRFYAMKVLKKQRVVQMKQIEHTNDERRMLKLAQHPFIIRMWGTFQDCHNLFMIMDYIEGGELFSLLRKSQRFPTPVAKFYAAEVFLAIEYLHSLDIIYRDLKPENILLDKNGHIKLTDFGFAKEVQDVTYTLCGTPDYIAPEVVATKPYNKSVDWWSFGILIFEMLTGYTPFYDPTPMKTYENILNGSITYPDYLPPDILDLLQKLIVKDLTQRLGNLQGGSDDVKNHPWFKEVIWERLLSRDIETPYEPPITSGVGDTSQFDRYPEDKDLDYGISGVEDPYRDQFQDF

SEQ ID NO: 11329 - protein, 363 aa, Buchnera aphidicola
MHKQYHIAVLPGDGIGPEVMQEAYKILQVLREHFSLFIKTKEFDIGGIAIDNHGIALPKKTLIGCENSDAILLGSIGGKKWDTLPINERPERASLLPLRKHFNFFCNLRPSNLYKELNFLSPLRNDIVKHGFDILCVRELTGGIYFGKPRGRVTKKKLMYAFDTEIYYKFEIVRIAHLAFKLARSRKHKLCSIDKANVLESSILWREVVEEVSKEYPDVILSHLYIDNVCMQIIKDPNQFDVLLCSNLFGDIISDECAMITGSIGMLPSASLNEKNFGLYEPAGGSAPDIQGKNIANPIAQILSLSMLIRYSMNLNKIANKIDNAVINVLKKGYKTMDISKDQNYLKTNEMGDVIADFLKRDK

SEQ ID NO: 11330 - protein, 286 aa, Pediococcus pentosaceus ATCC 25745
MEYVKLNDGNQMPQLGFGVFQVSDLSQAEQAVSDALDTGYRLIDTAAAYDNEEAVGAAIKKSGINRSEIFVTSKLWVDHFTYEKAQQGIEDSLNKLGLDYIDLYLLHQPYGDTAGAWRALIEAQKAGKIKSIGVSNFAPDQLMNLELMSDVKPALNQIEVSPWYQEGEAVGFAQSQDVQVEAWAPFAEGKHNIFSNETIAEIGQKYGKANGQVILRWLLQRGIVVIPKSVHKTRMAENLDVFDFELSDDDMQKMSSLDKNESQFFDHRDPEAIVSIFGESLKALRK

SEQ ID NO: 11331 - protein, 463 aa, Methanocaldococcus jannaschii DSM 2661
MFIDGKWINREDMDVINPYSLEVIKKIPALSREEAKEAIDTAEKYKEVMKNLPITKRYNILMNIAKQIKEKKEELAKILAIDAGKPIKQARVEVERSIGTFKLAAFYVKEHRDEVIPSDDRLIFTRREPVGIVGAITPFNFPLNLSAHKIAPAIATGNVIVHHPSSKAPLVCIELAKIIENALKKYNVPLGVYNLLTGAGEVVGDEIVVNEKVNMISFTGSSKVGELITKKAGFKKIALELGGVNPNIVLKDADLNKAVNALIKGSFIYAGQVCISVGMILVDESIADKFIEMFVNKAKVLNVGNPLDEKTDVGPLISVEHAEWVEKVVEKAIDEGGKLLLGGKRDKALFYPTILEVDRDNILCKTETFAPVIPIIRTNEEEMIDIANSTEYGLHSAIFTNDINKSLKFAENLEFGGVVINDSSLFRQDNMPFGGVKKSGLGREGVKYAMEEMSNIKTIIISK

SEQ ID NO: 11332 - protein, 472 aa, Chloroflexus aurantiacus
MSVGVAYTLTLRCQIENRPGMLGRLTTLIGEVGGDIGAIDIVRAERNILVRDITVRVQDEQHGEQLVAAINTLQNIKVLQVSDRVFLTHLGGKLATQSRVPLKTRDDLSLAYTPGVARVCRAIADDPEKVYALTWKGNSVAVVSDGSAILGLGNLGPEAAMPVMEGKAILFKELANIDAVPICLRSQDPDVIVQTVEQIAPSFGGINLEDIAAPNCFIVEGRLEESLDMPVMHDDQHGTAVVVLAALRNAVRIVGKRLADVRVVVNGIGAAGTAIIRTLIEAGVGEITAVDRFGILVEGDHARQTPMQRIIASQTNRERRRGDLAVALRGADVFIGVSKGNILTPDHIRVMSSDPIVFALANPIPEGDPDMLRQYARVVATGRSDQPNQINNVLSFPGIFRGALDVHARRITSAMRLAAAEALATVIPPEEMNEDYIVPSVFNRQVVPAIAAAVAQAAIAEGVARRTHMPGD

SEQ ID NO: 11333 - protein, 115 aa, Glycine max
MSAINITNVTALDNPAPFVSPFQFEISYECLTSLKDDLEWKLIYVGSAEDETYDQTLESVLVGPVNVGNYRFVLQADPPDPSKIREEDIIGVTVLLLTCSYMGQEFLRVGYYVNN

SEQ ID NO: 11334 - protein, 394 aa, Thermobifida fusca
MLSTQSADIVRATLPVVGAHLDEITSRFYSTMFSERPELLDGLFNRGNQANGEQRRALAGSIAGFASALLANPDERPDALLARIAHKHAAVAVTDDQYVIVHKYLFGAIADVLGDAATPEVIAAWDEVYWLMGGALIALEARLYAEKNADNGRTWREWTIVDRREETPDVFSLVLRPSDGGPLPEARPGQYVSVLHRMPDGIRQIRQYSISGGDEHTRRITIKRVRGTEHTPEGEMSALLYATAKAGDTLTVSAPFGDVVLTDSDRPLVFATAGIGCTPIVGMLNYLAATGATRRILALHADRSRAEHALWQETSTLIARLPHAQYVVWYEEGDGGLPGQMDLTGLEIPADAEVYLCGPLPFMREIRTQFLAAGVPAKDIHYEVFGPDLWLPAD

SEQ ID NO: 11335 - protein, 291 aa, Saccharomyces cerevisiae
LVHVASVEKGRSYEDFQKVYNAIALKLREDDEYDNAIGYGPVLVRLAWHISGTWDKHDNTGGSYGGTYRFKKEFNDPSNAGLQNGFKFLEPIHKEFPWISSGDLFSLGGVTAVQEMQGPKIPWRCGRVDTPEDTTPDNGRLPDADKDAGYVRTFFQRLNMNDREVVALMGAHALGKTHLKNSGYEGPWGAANNVFTNEFYLNLLNEDWKLEKNDANNEQWDSKSGYMMLPTDYSLIQDPKYLSIVKEYANDQDKFFKDFSKAFEKLLEDGITFPKDAPSPFIFKTLEEQGL

SEQ ID NO: 11336 - protein, 291 aa, Saccharomyces cerevisiae
LVHVASVEKGRSYEDFQKVYNAIALKLREDDEYDNYIGYGPVLVRLAWHISGTWDKHDNTGGSYGGTYRFKKEFNDPSNAGLQNGFKFLEPIHKEFPWISSGDLFSLGGVTAVQEMQGPKIPWRCGRVDTPEDTTPDNGRLPDADKDAGYVRTFFQRLNMNDREVVALMGAHALGKTHLKNSGYEGPQGAANNVFTNEFYLNLLNEDWKLEKNDANNEQWDSKSGYMMLPTDYSLIQDPKYLSIVKEYANDQDKFFKDFSKAFEKLLEDGITFPKDAPSPFIFKTLEEQGL

SEQ ID NO: 11337 - protein, 291 aa, Saccharomyces cerevisiae
LVHVASVEKGRSYEDFQKVYNAIALKLREDDEYDNYIGYGPVLVRLAWHISGTWDKHDNTGGSYGGTYRFKKEFNDPSNAGLQNGFKFLEPIHKEFPWISSGDLFSLGGVTAVQEMQGPKIPWRCGRVDTPEDTTPDNGRLPDADKDAGYVRTFFQRLNMNDREVVALMGAHALGKTHLKNSGYEGPWGAANNVFTNEFYLNLLNEDWKLEKNDANNEQWDSKSGYMMLPTDYSLIQDPKYLSIVKEYANDQDKFFKDFSKAFEKLLEDGITFPKDAPSPFIFKTLEEQGL

SEQ ID NO: 11338 - protein, 291 aa, Saccharomyces cerevisiae
LVHVASVEKGRSYEDFQKVYNAIALKLREDDEYDNYIGYGPVLVRLAWHISGTWDKHDNTGGSYGGTYRFKKEFNDPSNAGLQNGFKFLEPIHKEFPWISSGDLFSLGGVTAVQEMQGPKIPWRCGRVDTPEDTTPDNGRLPDADKDAGYVRTFFQRLNMNDREVVALMGAHALGKTHLKNSGYEGPYGAANNVFTNEFYLNLLNEDWKLEKNDANNEQWDSKSGYMMLPTDYSLIQDPKYLSIVKEYANDQDKFFKDFSKAFEKLLEDGITFPKDAPSPFIFKTLEEQGL

SEQ ID NO: 11339 - protein, 141 aa, Triticum aestivum
  misc_feature (71)..(71): Xaa can be any naturally occurring amino acid
  misc_feature (76)..(76): Xaa can be any naturally occurring amino acid
  misc_feature (81)..(81): Xaa can be any naturally occurring amino acid
  misc_feature (97)..(97): Xaa can be any naturally occurring amino acid
  misc_feature (130)..(131): Xaa can be any naturally occurring amino acid
MAPTVMASSATSVAPFQGLKSTAGLPVSRRSNGASLGSVSNGGRIRCMQVWPIEGIKKFETLSYLPPLKHXGLLKXVDYLXSAPKWVPCLEFKQGGXTSREHNASPGVYDGRYWAMWKLPMFRCTDPTRXXQVEEARGYLT

SEQ ID NO: 11340 - protein, 502 aa, Streptomyces atroolivaceus
MSDFSRRRLLKTSAVAGAGAVVVPGVAAAATPSAGVVTEASVNEAYEAQCSPAKLTGRIVRPHDPGYTDARLGWDQLFSHYPLVIVFAQNTQDVVNALTWARQNDVALRIRSGRHSLEGWSNVDSGLVIDISELKSVHLDSAARVATVGAGLNQLEAVTTLAKRNFAVTTGTEGTVGLAGATLGGGFGFLTRWLGMACDSLIGAEVVVAEGGECAKVIKADLTHNSDLLWALRGAGNGNFGIVTSLTYKVAPLKSVTYVQATWDGIGDLRRVFNAWQRTALHADDRLGTQVEIHRNQTLLFAVLAEGTPAEAKKLLAPILSVGSPQVSVQVGNWGEVYSGFQIPTANEPANWKFYSQFTRKPFPGKAIDVICSFMKHAPTDDSNFFTQAFGGAVRRSPRGGTAFPHRDALFYSEPGAGWGTRSDQPGICDPLTPQAQAWIAEFSQALRPYVDGAYVNVPNVGMQDWETAYWRGNFDRLREIKAKYDPHNVFQYDQSIPPASR

SEQ ID NO: 11341 - protein, 278 aa, Staphylococcus epidermidis ATCC 12228
METVQFYNGRTMPKIGLGTYRVKDGDECRESVKYAIERGYRSIDTAMIYGNEETVGQGIKEGLESTGLSREDLFITSKLWLTDFGRQNVEDAYRQSVAKLGLDYLDLYLMHWPGTNEAVMIDTWRGMEDLYKQNQVKNIGVSNFTPEHFEALLAQVSIKPVINQVEFHPYLTQNKLRKYLEAQNIIMESWSPLMNSQILHDEVINEVANEVGKTPAQVVIRWNIQHDVVVIPKSVTPHRIEENLDVWNFELSDNQMERIDQLNQDKRIGPNPLEFDGK

SEQ ID NO: 11342 - protein, 663 aa, Triticum aestivum
  misc_feature (51)..(51): Xaa can be any naturally occurring amino acid
MPAWWKGKGRSKSKAPAPAGDAGTIPAVRDGEKDRKNKKATSFDEALIGRXGRGKQLQQPAPAVGHPLPRPAFMPSASAPASASASASSGGSSSLGSSAASDEPLDLGIYRISDANRTPAIDSRKQSLVLEEGRFVVHNLASENNRSCEPSVSPRKEFQSNILDLPSDRTTYCHGRKSTEIVFATRMPSSPPSSRGKNCPTSPVHSRAFGQCPGSPTAWQEDARSSSSPHPLPLPPGSPCTSSRSLHSQWKKGKLLGSGTFGQVYLGFNSEGGQMCAIKEVKVIADDSNSKECLRQLNQEMLLLNQLSHPNIVQYYGSELSSETLSVYLEFVSGGSIHKLLQEYGPFGETILRNYTAQILSGLAYLHGRNTVHRDIKGANILVDPNGDIKLADFGMAKHISAYTSIKSFKGSPYWMAPEVIMNTNGYSLSVDIWSLGCTILEMATARPPWSQYEGVAAIFKIGNSKDIPDIPDHLSSEAKSFLKLCLQRDPAARPTAAQLIEHPWVKDQASVRSSRSGSGITRDMFSTSTDGSKATVKTSIELSSYRSLSPLRDTNLRMRNLVVPASSIPSISTHRASAISASNVRMNMSLPVSPCTSPLRQYRQSNRSCLPSPPHPAYSAGAANYSPINNVLYPTRPSNYLTDPWLETPRQKTQTFDSPRRL

SEQ ID NO: 11343 - protein, 249 aa, Cucumis sativus
MGKCYPVVSEEYQKAIEKAKRKLRGFIAEKNCAPLMLRLAWHSAGTFCKDSKTGGPFGTMRFKSELAHGANNGLDIAVRLLEPIKEQFPILSYADFYQLAGVVAVEVTGGPDVPFHPGREDKPEPPPEGRLPDATKGSDHLRDVFYTMGLSDQDIVALSGGHTLGRAHKERSGFEGPWTTNPLIFDKSYFTELLTGEKEGLLQLASDKALLSDPVFRPLVEKYAADEDAFFADYAEAHQKLSELGFADA

SEQ ID NO: 11344 - protein, 143 aa, Fusobacterium nucleatum subsp. vincentii ATCC 49256
MSMTQINWYPGHMKKTKDLIEENLKLIDVVLEIVDARIPLSSKNPNIASLSKNKKRIIVLNKSDLVSKQELDKWKKYFKEQDFADEVVEMSAETGYNVKKLYEAIEFVSKERKEKLLKKGLKKVSTRIIVLGIPNVGKCKINK

SEQ ID NO: 11345 - protein, 638 aa, Zea mays
  misc_feature (111)..(111): Xaa can be any naturally occurring amino acid
  misc_feature (139)..(139): Xaa can be any naturally occurring amino acid
  misc_feature (598)..(598): Xaa can be any naturally occurring amino acid
  misc_feature (616)..(616): Xaa can be any naturally occurring amino acid
  misc_feature (627)..(627): Xaa can be any naturally occurring amino acid
MGNTCVGPSITMNGFFQSVSTALWKTPQEGDALPAAANGPGGASPGRSQSALPKPASDVHHVAVQSEAPEPVKIAAYHSEPAPAVRSEAPEPVKIAASHSEPAPMAAKPGXGAAANASPSPSPRPRPQVKRVSSAGLLXLGSVLRRKTENLKDKYSLGRRLGQGQFGTTHLCVERATGKELACKSILKRKLATDDDVEDVRREIQIMHHLAGHPSVVAIRGAYEDAVAVHLVMELCGGGELFDRIVRRGHYTERKAAELARVIVGVVEACHSMGVMHRDLKPENFLFADHSEEAALKTIDFGLSIFFRPGQIFTDVVGSPYYVAPEVLKKRYGPEADVWSAGVIIYILLCGVPPFWAENEQGIFEEVLHGRLDFESEPWPSVSEGAKDLVRRMLIRDPRKRLTAHEVLRHPWVQVGGLAPDRPLDSAVLSRMKQFSAMNKLKKMALRVIAENLSEDEIAGLREMFKMIDADNSGQITFEELKVGLEKVGANLQESEIYALMQAADVDNNGTIDYGEFIAATLHLNKVEREDHLFAAFQYFDKDGSGYITADELQVACEEFGLGDVQLEDVIGEVDQDNDGRIDYNEFVAMMQKPPVGXSRRRPTCRTASASGSGGXRSGWPRPLCLXLPCCLGVGVDD

SEQ ID NO: 11346 - protein, 251 aa, Brassica napus
MNIAHTIFGVFGNATALFLFLAPSITFKRIIKNKSTEQFSGIPYPMTLLNCLLSAWYGLPFVSKDNTLVSTINGTGAVIETVYVLIFLFYAPKKEKAKIFGVFTAVRAVFATVALVSLFALHGNGRKLFCGIAATVFSIIMYASPLSIMRLVVKTKSVEYMPFFLSLFVFLCGTSWFIYGLIGRDPFVAIPNGFGCALGTVQLILYFIYCGNKGDKSTDDAEKDEKKTVEMKDEEKKKQNVVNGKQQEQQV

SEQ ID NO: 11347 - protein, 196 aa, Oryza sativa (japonica cultivar-group)
MASSPYHAAVGVAVLAILLAAPAAEAGAPTAAPLANYSLEDACKKTGPHYGLCIVTLSADRSAKSSDTVGLARVAVLAAQKNASETATYLSSIYDDDSIEKKTVQLQQCLEDCSERYEAAVEQLTDATVALDTGGYEEAMALVAAGQAEVKMCQRGFKAVPQHRNILTLRNREVDQLCSIAFTITKLIRVSPSAEE

SEQ ID NO: 11348 - protein, 299 aa, Triticum aestivum
  misc_feature (116)..(116): Xaa can be any naturally occurring amino acid
MENADVPNGATAPAPTQATPVVREQDRLMPIANVIRIMRRALPAHAKISDDAKEAIQECVSEFISFVTGEANERCHMEHRKTVNAEDIVWALNRLGFDDYVVPLSVFLHRMRDPEXGATGGAAAGGRPAVTSAPPRAAPPVLHAMPLHAQMQRPMYAPPALVQVQNQMQRPIYAPPAPMQVQNQVQWPMYAPPPPVQVQMQRGVYAPRAPVQGYTVGITPVRPNVGGQCHVFGGEQVVAQQYYGYGYGEGAYGAGSSKGGACADEGSSSNGVPVPGEGTGEPEPEPAAEGSQDKPVQSG

SEQ ID NO: 11349 - protein, 177 aa, Oryza sativa (japonica cultivar-group); identical to SEQ ID NO: 276

SEQ ID NO: 11350 - protein, 278 aa, Triticum aestivum
RLKRKTESVKEKYSLGRRLGQGQFGTTYLCVERSSGKEYACKSILKRKLVTDDDVEDVRREIQIMYHLAGHPNVISIRGAYEDAVAVHLVMELCAGGELFDRIVQKGHYTERKAAELARVIVGVVEVCHSMGVMHRDLKPENFLFVDQTEEAALKTIDFGLSVFFRPGQIFTDVVGSPYYVAPEVLKKKYGPEADVWSAGVIIYILLCGVPPFWAENEQGIFEEVLHGKLDFESDPWPSISEGAKDLVRRMLLRDPKKRLTAHEVLRHPWVQVGGLAP

SEQ ID NO: 11351 - protein, 530 aa, Triticum aestivum
  misc_feature (247)..(247): Xaa can be any naturally occurring amino acid
  misc_feature (304)..(304): Xaa can be any naturally occurring amino acid
  misc_feature (314)..(314): Xaa can be any naturally occurring amino acid
  misc_feature (354)..(354): Xaa can be any naturally occurring amino acid
MGEQKGNILMGKYEMGKMLGQGTFAKVYHARNIETSQSVAIKVTDKEKVLKGGLTDQIKREISVMKLVKHPNIVQMYEVMATKTKIYFVLEHVKGGELFNKVQRGRLKEDAARKYFQQLICAVDFCHSRGVYHRDLKPENLLLDENSNLKVSDFGLSTISECRRLDGLLHTSCGTPAYVAPEVINRKGYDGAKADIWSCGVILFVLLAGYLPFQDKNLMNMYKKIGKAEYKCPSCISSHMQRPRAGXDFLKAKDAVPAADMTATSDPLSCSNSATEGKEQGAKKLSNLNAFDIISLSTGLDLSXGMFEDNDKKXGESKFTSTNSASTIVSKIEDIAKCMRLKLVKKDGGMMRMXESFKPREGKGVMSIDAELFEVIHRFDVMVLNETVWDSSDVLTCSLDMKKELTPVFSVVELKETEADTMEYQIVLKQEMRPALKDISIGGARRAAAAISNSSYHEKNCAKCYILFTTRGTYQASVCFCNFYYSKFVIRLHCPCDVCVNFSSHLSMKIYLKAWCLQNRCQVFVQKRTC

SEQ ID NO: 11352 - protein, 476 aa, Bacillus thuringiensis serovar konkukian str. 97-27
MQNKIIVMFQKDFRLYDNPALFEAAQSGEVVPVYVHDETFSMGSASKWWLHHAIIDVKKQLEALGSTLIIRKGSTQEEILSLVEQLGITAVYWNICYDPDRLQFNQKMKMMLEHKGMICKEFNSHLLLEPWVIKKKDNTEYKVFTPFYNAFQKQVIHKPISKVQSIKGGNSLPVSLSVSELHLLPTIPWTSHMESIWEPTEEGAYKTWKEFFSSKLASYSEGRDFPNQNAHSMLAPYLSFGQISVKLIYHYLINKSTESQCSLFEKQVNSFIRQLIWREFSYYLLYHYPFTAYKPLNKSFEHFPWNNEEELLRVWQKGDTGYPFIDAGMRELWQTGFMHNRTRMAVASFLVKHLLIPWQEGAKWFMDTLLDADIANNTMGWQWVAGSGADASPYFRIFNPITQGEKFDKNGEYIREWVPELKDMPNKYIHKPWEAPEHILQKANIQLGHTYPLPVVDHKAARERALCAYKSMKEFV

SEQ ID NO: 11353 - protein, 341 aa, Actinomadura hibisca
MTEPEGPHAASLRLQSLLDGMRVAKVVQVLAELQVADAVADGPCKPAEIAADVGADPDALYRVLRCAASFGVFTEDEDGRFGLTPMAALLRTGTDDSHRDLFMMAAGDLWWRPYGELLETVRTGRPAAELAFGMPFYDYLGTDPAAAGLFDRAMTQVSKGQAKAILGRCSFERYARIADVGGGHGYFLAQVLRSSPRTEGVLLDLPHVVAGAPAVLEKHEVADRVQVVPGSFFDALPTGCDAYLLKAILINWPDADAERILHRVREAIGTDRDARLLVVEPVVPPGDVRDYSKATDIDMLAIIGGRQRTVAEWRRLLRAGGFELVGEPTPGRREVMECRPI

SEQ ID NO: 11354 - protein, 438 aa, Bacillus halodurans C-125
MKRFDLIIRSSTVVTETTTYRADVAIRNGIVSAITEPGSISSDDGPAIDGTGLHLFPGMVDVHVHFNEPGRTEWEGFASGSKSLAAGGVTTYFDMPLNSNPPTITREELDKKRQLANEKSLVDYRFWGGLVPGNIDHLQDLHDGGVIGFKAFMSECGTDDFQFSHDETLLKGMKKIAALGSILAVHAESNEMVNALTTIAIEEQRLTVKDYSEARPIVSELEAVERILRFAQLTCCPIHICHVSSRKVLKRIKQAKGEGVNVSVETCPHYLLFSLDEFAEIGYLAKCAPPLRERQEVEDLWDGLMAGEIDLISSDHSPSLPQMKTGKTIFEVWGGIAGCQNTLAVMLTEGYHKRKMPLTQIVQLLSTEPAKRFGLYPQKGTIQVGAEASFTLIDLNESYTLNASDLYYRHPISPYVGQRFRGKVKHTICQGKHVYQDH

SEQ ID NO: 11355 - protein, 419 aa, Zea mays
PTRPVLLRFADLIERHAEEVAALETWDNGKTLAQAAGAEVPMVARCVRYYAGWADKIHGLVAPADGAHHVQVLHEPVGVAGQIIPWNFPLLMFAWKVGPALACGNTVVLKTAEQTPLSALYVANLLHEAGLPEGVLNVVSGFGPTAGAALCSHMGVDKLAFTGSTGTGQIVLELAARSNLKPVTLELGGKSPFIVMDDADVDQAVELAHQAVFFNQGQCCCAGSRTFVHERVYDEFVEKSKARALKRVVGDPFRDGVEQGPQIDGEQFNKILRYVQSGVDSGATLVAGGDRVGDRGFYIQPTVFADAKDEMKIAREEIFGPVQTILKFSGVEEVIRRANATPYGLAAGVFTRSLDAANTLSRALRAGTVWVNCYDVFDATIPFGGYKMSGVGREKGIYALRNYLQTKAVVTPIKNPAWL

SEQ ID NO: 11356 - protein, 322 aa, Glycine max
  misc_feature (298)..(298): Xaa can be any naturally occurring amino acid
  misc_feature (310)..(310): Xaa can be any naturally occurring amino acid
MASSLRISRLISRSFSSTSFFSRGGNGFLGSRQSKFSTSAAIEEEPIKPSIQVEHTQLLIDGKFVDAASGKTFQTLDPRTGEVIAHVAEGHSEDVDRAVSAARKAFDHGPWPKMTAYERQRILLRVADLIEKHNDELAALETWDNGKPYEQAAKIEVPMLVRLIRYYAGWADKIHGLTVPADGPYHVQTLHEPIGVAGQIIPWNFPLLMFAWKVGPALACGNTIVLKTAEQTPLSALYAAKLFHEAGLPAGVLNVVSGFGPTAGAALASHMEVDKLAFTGSTDTGKVVLELAAKAILXPVTLELGGESPXIVCEDADVDQAV

SEQ ID NO: 11357 - protein, 344 aa, Datura stramonium
MEVLSSTHTNGSSLLKNGVITMNGHHNGNSDHRNGGTTVHENGRKLLGNSNSIKPGWFSEFSALWPGEAFSLKIEKLLFQGKSDYQDVMLFESATYGKVLTLDGAIQHTENGGFPYTEMIVHLPLGSIPNPKKVLIIGGGIGFTLFEVLRYPTVEKIDIVEIDDVVVDVSRKFFPYLAANFNDPRVTLVLGDGAAFVKAAQAGYYDAIIVDSSDPIGPAKDLFERPFFEAVAKALRPGGVVCTQAESIWLHMHIIKQIIANCRQVFKGSVNYAWTTVPTYPTGVIGYMLCSTEGPEVDFKNPVNPIDKDETHANSKLGPLKFYNTDIHKAAFILPSFARSMIES

SEQ ID NO: 11358 - protein, 122 aa, Buchnera aphidicola str. APS (Acyrthosiphon pisum)
MSITKEQILEAISEMSVMNVVDLITAMEEKFGVSASMSINSNNHNEKDLREEKTEFDIFLKVIGPNKVSVIKTVRSATGLGLKEAKDLVESAPTVLKENISKEDAESLKKTLEDVGAEIEIK

SEQ ID NO: 11359 - protein, 314 aa, Vibrio cholerae O1 biovar eltor str. N16961
MVNNSIQWFPGHMHKARKEIEEAIPQVDVIIEVLDARIPFSSENPLISHIRGEKPCVKVLNKRDLADPELTELWIAHLEQEKGVKAMAITTSNPQEVHKILELCRKLAPQREEIGKNIRTMIMGIPNVGKSTIINTLAGRAIAQTGNQPAVTRRQQRINLQNGIVLSDTPGILWPKVENPHSGFRLAATGAVKDTAMEYDEVAFYTVEYLAKHYPERLKERYQIDELPETDVELMEEIGRKRGALRAGARVDLHKASEILLHELRQGVLGQITLERPEMITEELQQVEIDEALKAEEKAKRKEERRKRYLRNKR

SEQ ID NO: 11360 - protein, 178 aa, Triticum aestivum
MGSNGGADGAGFNTDALEGVRAILLKPSESLDESTRIAGPDFNDAGLGLAGMLGSLASTGFQASHLGDAIDVVNQMLDWRLSHEKPSEDCDGAELEPKYRESVKCKIFLGFTSNLVSSGIRDVIRFLVQHHMVDVIVTSAGGIEEDLIKCLGPTYRGDFSLPGALLRSKGLNRIGNLL

SEQ ID NO: 11361 - protein, 496 aa, Staphylococcus aureus subsp. aureus COL
MELLKHLSQRQYIDGEWVESANKNTRDIINPYNQEVIFTVSEGTKEDAERAILAARRAFESGEWSQETAETRGKKVRAIADKIKEHREALARLETLDTGKTLEESYADMDDIHNVFMYFAGLADKDGGEMIDSPIPDTESKIVKEPVGVVTQITPWNYPLLQASWKIAPALATGCSLVMKPSEITPLTTIRVFELMEEVGFPKGTINLILGAGSEVGDVMSGHKEVDLVSFTGGIETGKHIMKNAANNVTNIALELGGKNPNIIFDDADFELAVDQALNGGYFHAGQVCSAGSRILVQNSIKDKFEQALIDRVKKIKLGNGFDADTEMGPVISTEHRNKIESYMDVAKAEGATIAVGGKRPDRDDLKDGLFFEPTVITNCDTSMRIVQEEVFGPVVTVEGFETEQEAIQLANDSIYGLAGAVFSKDIGKAQRVANKLKLGTVWINDFHPYFAQAPWGGYKQSGIGRELGKEGLEEYLVSKHILTNTNPQLVNWFSK

SEQ ID NO: 11362 - protein, 193 aa, Zea mays
MSAVNITNVAVLDNPTAFLNPFQFEISYECLVPLDDDLEWKLIYVGSAEDENYDQQLESVLVGPVNVGTYRFVLQADPPDPSKIREEDIIGVTVLLLTCSYMGQEFMRVGYYVNNDYDDEQLREEPPAKVLIDRVQRNILADKPRVTKFPINFHPEPSTGPGQQQQQQEPQTTSPENHTGNGEANGSKPEADQ

SEQ ID NO: 11363 - protein, 284 aa, Leuconostoc mesenteroides subsp. mesenteroides ATCC 8293
MAQIIQWFPGHMAKAFRLMRENLKLVDVVFELVDSRIPESSRNPEVDKLIGNKPRLLIMTKADLADPDQTRAWKKHFEAQGYTVLVLDTRDPRTPQLVTKAARRAVEAKKAAQLAKGIQDQPIRAMISGVPNVGKSTLLNHLVMKNVAPTADRPGVTKKIAWLKTPTKLELLDSPGVLWPKFEDQNIGMKLALTGAVKDTIFAKDDAALFLINFFREYRPEAIIERYHLNDNIFDQENVDVLLSITSKLGFKDDYDKASERILNDLRKNKLGAFTLDLIETKND

SEQ ID NO: 11364 - protein, 355 aa, Glycine max
  misc_feature (275)..(275): Xaa can be any naturally occurring amino acid
  misc_feature (304)..(304): Xaa can be any naturally occurring amino acid
  misc_feature (313)..(313): Xaa can be any naturally occurring amino acid
  misc_feature (330)..(330): Xaa can be any naturally occurring amino acid
  misc_feature (341)..(341): Xaa can be any naturally occurring amino acid
MFEGLCLKMEKRGNVLMEKYEFGKLLGQGNFAKVYHARDVRTGESVAVKVIDKEKILKIGLVDQTKREISIMRLVKHPNVLQLYEVLATKTKIYFIIEYAKGGELFNKIAKGRLTEDKARKYFQQLVSAVDFCHSRGVYHRDLKPENLLLDENGVLKVADFGLSALVESHRQKDMLHTICGTPAYVAPEVISRRGYDGTKADVWSCGVILFVLLAGHLPFYDLNLMSLYNKIGKADYKCPNWFPFEVRRLLAKILDPNPNTRISMAKVMENSWFXKGFKPKSGQVKREAVNVALVDSDQVFCLXENTSAAVVXGRASIVKPSQFNAFNIXSLSAGLDLSGXFAANVELDDIYIYE

SEQ ID NO: 11365 - protein, 236 aa, Zea mays
  misc_feature (134)..(134): Xaa can be any naturally occurring amino acid
MGRSNRKSPGSSGWIPGTDEAAAGGDDVLALEDAAAPREWTAQVEPGVQITFGTIPTGGNDLKRIRFSREMFNKWEAQRWWGENYDRIVELYNVVMFSGRQQGCSTPVSSVDDSQRDSSYSRGGSTSRGSPITXRRRRRHCRRWQAKNRSPGAPYDPSRATTSSRDEASVSLSNVSDLEATEWIEEDEPGVCLTIRELGDGTRELRRIRFSREIFGEDRAKVWWEQNRERIQAEYL

SEQ ID NO: 11366 - protein, 531 aa, Zea mays
MEAVGVTPAPVAAPEKKKLLDLKDPFPAAANGGAKASPASKWAMKKKLVGGDAGYVLEDVPHLTDYMPQLPTYPNPLQDNPAYSVVKQYFVNPDDTVTQKIVVHKTSARGTHFRRAGPRQRVYFQSDEVNAAIVTCGGLCPGLNTVIRELVCGLYDMYGVSSVVGIEGGYKGFYSKNTVALTPKSVNDIHKRGGTVLGTSRGGHDTAKIVDCLQDRGINQVYIIGGDGTQKGASVIYEEVRRRGLKCSVVGVPKTIDNDIAVIDKSFGFDTAVEEAQRAINAAHVEAESAENGIGVVKLMGRNSGFIAMYATLASRDVDCCLIPESPFYLEGKGGLLEFVERRLKDNGHMVIVVAEGAGQDLIARSMNFVDTQDASGNKLLLDVGLWLSQKIKDHFKKKPSFPITLKYIDPTYMIRAVRSNASDNVYCTLLAHSALHGAMAGYTGFTVAPVNGRHAYIPFYRITEKQNKVVITDRMWARVLCSTNQPCFLSHEDVENMKHDDDEHHHMHNTQLLEGGSSPVSKCNGSAAAV

SEQ ID NO: 11367 - protein, 366 aa, Aspergillus nidulans FGSC A4
MTSQRPTSSSSSLLDIVANLASPKSLLFNAHHTNPPPSLPSQRAPTMDKSQQPSSFQQLEKLGEGTYATVFKGRNRQTGELVALKEIHLDSEEGTPSTAIREISLMKELKHESIVSLYDVIHTENKLMLVFEYMDKDLKKYMDTRGDRGQLDQATIKSFMHQLMSGIAFCHDNRVLHRDLKPQNLLINKKGQLKLGDFGLARAFGIPVNTFSNEVVTLWYRAPDVLLGSRTYNTSIDIWSAGCIMAELYTGRPLFPGTTNEDQLQKIFRLMGTPSERSWPGISQLPEYRANFHVYATQDLGLILPQIDPLGLDLLNRMLQLRPEMRIDAHGALQHPWFHDLPQLQAQLQQQQMAGYGGMMPPQQAY

SEQ ID NO: 11368 - protein, 257 aa, Zea mays
  misc_feature (139)..(139): Xaa can be any naturally occurring amino acid
  misc_feature (210)..(210): Xaa can be any naturally occurring amino acid
  misc_feature (234)..(234): Xaa can be any naturally occurring amino acid
  misc_feature (240)..(240): Xaa can be any naturally occurring amino acid
  misc_feature (249)..(249): Xaa can be any naturally occurring amino acid
GRKPNPSARGGKAAKGEAPGTGSHYLLVLTPTPTNQPPLPAASPAAGGHGCKSPFIIMDDADVDHAVELAHFALFFNQGQCCCAGSRTFVHERVYDEFVEKAKARALKRVVGDPFRKGVEQGPQIDDEQFNKILRYIRXYGVDGGATLVTGGDRLGDKGFYIQPTIFSDVQDGMKIAQEEIFGPVQSILKFKDLNEVIKRANASQYGLAXAGVFTNSLDTANTLTRALRAGTVXWVNCFXDVFDAAIPXGGYKMSGI

SEQ ID NO: 11369 - protein, 225 aa, Glycine max
MLSISATRIFFLRSTTIRLSSSSSSLQFFSNPNRTLFRPFLHTSFKPLPSSFSFRTDHTMATSNAKSVHDFTVKDAKGNDINLGDYKGKVLIIVNVASQCGLTNSNYTELSQLYEKYKQKGLEILAFPCNQFGAQEPGSNEQIQEFVCTRFKAEFPVFDKVDVNGDKAAPLYKYLKSSKGGLLGDGIKWNFAKFLVDKEGNVVDRYAPTTSPLSIEKDLLKLLDA

SEQ ID NO: 11370 - protein, 311 aa, Prochlorococcus marinus str. MIT 9313
MHHRPTLASKPYGGLSWKKVLGLLAMDSPSTTANGWIDEHHQGVRYGLQGRVLVDETSPYQRITVIDSSRYGKGLLLDGCWMTAEHQERHYHESLVHPALCSAAQLERVLVIGGGDGGTARECLRYQDVKHLDMVEIDRRVVELSQKHLPSLGSHAWSDPRLQLNLENGIAWVANATESSYDVILIDGSDPAGPAEGLFNQTFFEHCRRILRPGGVFATQSESPEAFRQVHIDTVRLIRQVFGYADPLYGWVPMYPSGWWSWTFAAIDGPRYRNPLPARAAAISAGCEIWSPRWQQGAFEAIPAFIERELT

SEQ ID NO: 11371 - protein, 138 aa, Candida albicans SC5314
MQCSALRKNGHVVIKNRPCKIVDMSTSKTGKHGHAKVHLVAIDIFTGKKLEDLSPSTHNMEVPNVSRQEFQLLDIDDGYLSLMTADGDTKDDVKVPEGELGDKLQSEFDEGKDLIVTIISAMGEEAAISYKEAPKGSA

SEQ ID NO: 11372 - protein, 283 aa, Streptococcus pneumoniae R6
MATIQWFPGHMSKARRQVQENLKFVDFVTILVDARLPLSSQNPMLTKIVGDKPKLLILNKADLADPAMTKEWRQYFESQGIQTLAINSKEQVTVKVVTDAAKKLMADKIARQKERGIQIETLRTMIIGIPNAGKSTLMNRLAGKKIAVVGNKPGVTKGQQWLKTNKDLEILDTPGILWPKFEDETVALKLALTGAIKDQLLPMDEVTIFGINYFKEHYPEKLAERFKQMKIEEEAPVIIIDMTRALGFRDDYDRFYSLFVKEVRDGKLGNYTLDTLEDLDGND

SEQ ID NO: 11373 - protein, 296 aa, Thermotoga maritima MSB8
MRTLKELERELQPRQHLWYFEYYTGNNVGLFMKMNRVIYSGQSDIQRIDIFENPDLGVVFALDGITMTTEKDEFMYHEMLAHVPMFLHPNPKKVLIIGGGDGGTLREVLKHDSVEKAILCEVDGLVIEAARKYLKQTSCGFDDPRAEIVIANGAEYVRKFKNEFDVIIIDSTDPTAGQGGHLFTEEFYQACYDALKEDGVFSAETEDPFYDIGWFKLAYRRISKVFPITRVYLGFMTTYPSGMWSYTFASKGIDPIKDFDPEKVRKFNKELKYYNEEVHVASFALPNFVKKELGLM

SEQ ID NO: 11374 - protein, 371 aa, Eriobotrya japonica
MGKGGMSDGDHADRCCGEAINGDVQQENMAAWLLGVKNLKIQPYKLPNLGPHDVRVRLKAVGICGSDVHHFKNMRCVDFIVKEPMVIGHECAGIIEEVGSEVEDLVPGDRVALEPGISCKRCNLCKQGRYNLCRKMKFFGSPPNNGCLANQVVHPGDLCFKLPDNVSLEEGAMCEPLSVGIHACRRANVCQETNVLVVGAGPIGLVTLLAARAFGAPRIVIADVNDERLSIAKSLGADEVVKVSTNIEDLAEEVATIQKVLENGVDVSFDCAGFDKTITTALSATRPGGKVCLVGMGQREMTLPLATREIDVIGIFRYQNTWPLCLEFLRSGKIDVKPLITHRFGFSQKEVEEAFETSARGGNAIKVMFNL

SEQ ID NO: 11375 - protein, 365 aa, Aspergillus oryzae
MAEFVRAQIFGTTFEITSRYTELQPVGMGAFGLVCSARDQLTGQPVAVKKIMKPFSTPVLSKRTYRELKLLKHLRHENIISLSDIFISPLEDIYFVTELLGTDLHRLLTSRPLEKQFIQYFLYQILRGLKYVHSAGVVHRDLKPSNILINENCDLKICDFGLARIQDPQMTGYVSTRYYRAPEIMLTWQKYDVEVDIWSAACIFAEMLEGKPLFPGKDHVNQFSIITELLGTPPDDVIETICSENTLRFVKSLPKRERQPLATKFKNADPDAVDLLERMLVFDPKKRIRAGEALAHEYLAPYHDPTDEPVAEEKFDWSFNDADLPVDTWKIMMYSEILDFHNIDQGTEASQVLVEGAGDAQQNFV

SEQ ID NO: 11376 - protein, 220 aa, Porphyromonas gingivalis W83
MKFFIDTANLDQIREANDMGVLDGVTTNPSLMAKEGISGKDNCMRHYLAICEIVDGDVSAEVIATDYEGMIREGEELAALHPQIVVKVPCTAEGIKAIKYFSDKGIRTNCTLIFTVGQALLAAKAGASYVSPFVGRLDDIASDGIKLVENIVAMFGFYRYETEVLAASIRHTQHIIQCLEAGADVATCPLNAIKGLLKHPLTDSGLKAFLEDHRRVNEGK

SEQ ID NO: 11377 - protein, 77 aa, Zea mays
  misc_feature (26)..(26): Xaa can be any naturally occurring amino acid
  misc_feature (37)..(37): Xaa can be any naturally occurring amino acid
  misc_feature (66)..(66): Xaa can be any naturally occurring amino acid
SDRNAFRRNVEYACTAEEVQHHFQVXGTVNRATMLNXQVGQPKRVAHIELVRIGAFQETIHSGRIXLHGRHLKAAPQ

SEQ ID NO: 11378 - protein, 448 aa, Arabidopsis thaliana
MEQKFKTDSMNEDRISDLPDALLLQILSSLPTENAIATSVLSKRWRSLWTMLPKLKFDSNFNPVFDDDNIDPTMFSENVYKTLSLHKAPVLESLHLSFEGRTDCLHVGIWIATAFARGVRKLVLDSFYQEDQTVTLPSVLFSYNDSLEILKLKCAIDLDFPSRVCLKSLRKLYLDQVHFKDEESVCNLLCGCPSLQDLVVHRYSNADVATFTIASPSLQRLTIEDLRQEGGYGNGSYVINAPGLKYLNINGVIDIESCLIDKALELEEAKISNVSGITNENILESLTSAKRLILHLSPLEVKVPTGKIFDQLGCLELLTHEREWWNLLSIMLDSSPKLQILKLTDVYLHDNKTNPDERKWNPPKCAPECLLFHLETFLWIGYEWQRGDEKEVATYILENARRLKKATFSTKRIGREKLEDFEKRREMLNELAIVLWDSNSCHLVFEST

SEQ ID NO: 11379 - protein, 526 aa, Triticum aestivum
MSAIKPPPPDRPPQAARLPSPSSSSSAAAAAKQGGTGSRGLLMGRYELGRVLGKGTFAKVYHARHVQTGESVAIKVLDREKAVRSGLVSHIKREIAVLRRVRHPNIVHLFEVMATKTKIYFVMELLVRGGELFSRVSKGRLKEDIARRYFQHLISAVGFCHTRGVFHRDLKPENLLVDEAGNLKVSDFGLSAVAEPFQPEGLLHTFCGTPAYVAPEVLARRGYEGAKADIWSCGVILFVLMAGYLPFHDQNLMAMYRKVYKGEFRCPRWFSKDLTSLIMRFLDTNPSTRITLPEVMESRWFKKGFRPVKFYIEDDQLYNVIDAENDMLDLGLPDPLPQPLPPPPPSPSPQQVDGDDSGSESDASVVSCPATSSFEERHRLRGPLPRPASLNAFDIISFSRGFNLSGLFEEKGDEVRFISGEPMPDIITKLEEIANVKSFAVRKKDWRVSLEGTREGVKGPLTICAEIFELTPSLVVVEVKKKAGDKEEYDDFCNKELKPGMQHLVHQMVPVPNTPTISELAERPSR

SEQ ID NO: 11380 - protein, 183 aa, Erwinia carotovora subsp. atroseptica SCRI1043
MSTEIYAIPLTTIDGKATTFEAFKGQVALVVNVASKCGLTKQYDALEKLYETYRDKGLVVLGFPSNEFAGQEPGSEEEIQEFCRGTFGVQFPMFSKIEVNGENRHPLYQLLIRQQPEANGTWKSDFFARLVNKGRKPKNPEDILWNFEKFLVDREGRVIERFAPDMSPDHDTIVKAIEAALAK

SEQ ID NO: 11381 - protein, 159 aa, Streptococcus pyogenes M1 GAS
MPNLYDFTVKAQDGSDISLVDYKEKVVLVVNTATKCGLTPQYQALQALYDTYHDKGFEVLDFPCNQFLNQAPGDAEEINHFCSLTYHTTFPRFAKIKVNGKDADPLFTWLKEEKSGPLGKRIEWNFTKFLIDQNGQVIKRYSSKTDPKLIEEDLKALLG

SEQ ID NO: 11382 - protein, 451 aa, Synechococcus elongatus PCC 7942
MPSNTAAMLHVVQAIATTGANLTEMELLQRTNQWIDRRLIVEAASEEQAAAVVEAIAAVPDLELLDSEDRTFALHRGGKISVEPKLPLTSQAQLAMAYTPGVGRVCKAIAANPDRVYELTVKQNMVAIVTDGTAVLGLGNLGPAGALPVMEGKAMLFKAFGDVDAFPICLDTQDTDEIVETMKRIAPVFGGVNLEDIAAPRCFEIEARLKQELDIPVFHDDQHGTAIVTLAALENALKLVKKSLSQVRIVMNGAGAAGLSVASLLREAGATNIIICDSRGILSCDRSDLTPQKQAFAIEAGGSLADALVNADVFIGVSVPGVLTVEMVETMASDRIIFAMANPIPEIQPELIQGRAAVIATGRSDYPNQINNVLAFPGVFRGALDCRAKSLTSSMFLAAARAIAALVPPETLSAEHIVPSAFDSRVAPAVAAAVVEAAQANGLAQTLAVTH

SEQ ID NO: 11383 - protein, 339 aa, Desulfovibrio desulfuricans G20
MNLTEALLHALKERGAKEVYGIPGDFALPYFKIIESTGILPLVTLSHEPAVGFAADASARFRGGLGVAAVTYGAGALNMVNAIAQAYAEKSPVVVISGAPGTHEGGHGLLLHHQAKHLDSQYRMYKEVTCDQAVLDDPATAPETIARVLQSCIEHSRPVYLEIPRDLPAAPCAPVPAFAASGTDADAVDACARDVLQRVQSAALPMMMVGVEVRRYGIEDKVALLAERLGVPVVTSFMGRGLLASASCLEGTYLGMAGDETLSEAVESSDGLLLLGVIMSDTNFGVSGSQLDRRRVMHAEDRQVRVGYHVYHDIPLGALVDRLLALLDDGQEADMALSG

SEQ ID NO: 11384 - protein, 314 aa, Coccidioides posadasii
MASRHTTFRLNTGEDIPAIGFGTWQDENAQEDAVLTALSAGYRHIDTAAVYGTEKAIGRALARSRLSRDELFITSKLWNNKHRPEDVEQAIDQSLKNLEIDYLDLYLMHWPAAFAPGDDMFPKDSQGNSKTVDIDYVDTYKAMEKLVKSGKTKAIGISNFSKGEMERLLESCSIVPAVMQMELHPWLQQNDFVEWLKSKGIHVTQYSSLGNQNEVYSGRERYGRLIEDPALAAIGTKYGKTGAQVALAWGITKGHSVLVKSKTPHRIQQNFESDFELKQEDMKAIENIDKKLRFNDSSADFGYNFFVGLEGKEK

SEQ ID NO: 11385 - protein, 482 aa, Comamonas sp. NCIMB 9872
MNSSLHYNYVGGDWVNGATERHNLNPSDLSDSIGIYVGANEAQTQAAIDAAFDARTAWACWTAEQRADALDRIGTSILASAKELGHLLSREEGKTLAEGIGEAARAGRIFKYFAAEALRCGGDLLPAIRPGVSVEVTREPEGVVGIITPWNFPLAIPAWKIAPALAYGNTVVFKPADLVPGSAWALTEIIHRVGGLPPGVFNLVMGPGSKVGNTLANAPKVRALSFTGSATTGRQVGLACMERGAKVQMEMGGKNPLVVLNDADLQSAASVAIQGSFYSTGQRCTGSSRLIVEAGIHDAFVEAMRQQMSALSIGHALKQGTDIGPVASEDQLQQDLEYIRIGVAEGGRLYCGGSQLERETEGFYLSPALLTETDNSMRINREEIFGPVASVIRVGSYEEALHTANDTVFGLSSGICTTSLKYASDFKRRSAAGMVMVNVPTAGVDYHAPFGGRKGSSYGAREQGAYAREFYTVIKTAYTSAG

SEQ ID NO: 11386 - protein, 364 aa, Escherichia coli K12
MMSKNYHIAVLPGDGIGPEVMTQALKVLDAVRNRFAMRITTSHYDVGGAAIDNHGQPLPPATVEGCEQADAVLFGSVGGPKWEHLPPDQQPERGALLPLRKHFKLFSNLRPAKLYQGLEAFCPLRADIAANGFDILCVRELTGGIYFGQPKGREGSGQYEKAFDTEVYHRFEIERIARIAFESARKRRHKVTSIDKANVLQSSILWREIVNEIATEYPDVELAHMYIDNATMQLIKDPSQFDVLLCSNLFGDILSDECAMITGSMGMLPSASLNEQGFGLYEPAGGSAPDIAGKNIANPIAQILSLALLLRYSLDADDAACAIERAINRALEEGIRTGDLARGAAAVSTDEMGDIIARYVAEGV

SEQ ID NO: 11387 - protein, 363 aa, Buchnera aphidicola (Pemphigus spyrothecae)
MTKIYNLAILPGDGIGPELLQKDLNFKVLKEQYKLKINTTEYDIGGIAIDKYGKALPKETLDGCKESDSILFGSVGGPKWQHLPPDQQPERAALLPIRKYFNLFSNLRPAKLYSTLNHLSPLRRDISEKGFDILCVRELTGGIYFGKPKGYIKNIIDKKAFDTEIYYASEIKRIAHIGFKLAQNRKYKITSVDKANVLESSVLWRETVNTISKEYPDVKLSHLYIDHAAMQIIKNPDKFDVILTSNLFGDILSDECAMITGSIGMLPSASLNDSNFGLYEPAGGSAPDIAGKNIANPIAQILSIAMLVRYTMKLPMISDHIESAVIDTLKKGYRTLDIANDKEKYVSTNDIGDIISDILKKRI

SEQ ID NO: 11388 - protein, 140 aa, Brassica napus
  misc_feature (30)..(31): Xaa can be any naturally occurring amino acid
  misc_feature (46)..(46): Xaa can be any naturally occurring amino acid
MSLPLTKEKAAFSPSDPAMQRHVASGRPSXXDGSDFSYRMVVESRXQRVAEGRSRLARLILVQALHLVAGGLLLLLSLSKGAAVNKFAVLSMAAGFLAIVVGELGRLRIMAVLLRLYTSLSSIAVAFSVTCIIRSELFLK

SEQ ID NO: 11389 - protein, 496 aa, Avicennia marina
MPTRQLFIDGEWREPVQRKRIPIINPANEQTIGDIPAATAEEMDIAVEAARKAFFRNSGKDWSSTTGAHRAKYLRAIAAKIKDRKVELVELEAIDSGKPLEEASLDMDNVIGCFEYFAGIAERLDSEQRTPVSLPMETFKCHLLKEPIGVVGLISPWNYPLLMAIWKVAPALASGCTAILKPSELASVTCLELAEVCMEVGLPPGVLNILTGLGPEAGAPLVTHPHVAKISFTGSDTTGVKIMTAAAQLVKPVTLELGGKSPIVVFEDVDLDTAAEWTLFGCFWTNGQICSATSRLLVHESIATTFLEKLVKWCEKIKISDPLEEGCRLGPIVSRRQYEKVMKYISTAKEEGATILCGGARPEHLEKGYFVQPTIITDVKTSMQIWIEEVFGPVLCVKTFATEDEAVELANDTHYGLAAAVISKDLDRCERMAKAFQVGAVWVNCSQPCFYQAPWGGKKRSGFGRELGERGLDIYLNVKQVTRYVSSEPWGWYKSP

SEQ ID NO: 11390 - protein, 165 aa, Staphylococcus aureus subsp. aureus COL
MNNRNVYDIEVSDYKGLTYKLEAFRGKVILVVNTATECIYSEQLKKLETLFQKYKDRGFVVLSFPNNNFDNRQPGSNEEILKISREKFGVTFPVLAKISVNGNDEHPLFTHLKNEQPGIFGSPIKWNFTKFIIDRQGNVVNRFLPMEDPLDISTNIEILLQESSS

SEQ ID NO: 11391 - protein, 246 aa, Brassica napus
MNIAHTIFGVFGNATALFLFLAPSITFKRIIKNKSTEQFSGIPYPMTLLNCLLSAWYGLPFVSKDNTLVSTINGTGALIERVYVLIFLFYAPKKEKAKIFGVFTAVLAVFATVALVSLFALHGNARKLFCGIAATVFSIIMYASPLSIMRLVIKTKSVEYMPFFLSLFVFLCGTSWFIYGLIGRDPFVAIPNGFGCALGTLQLILYIIYCGNKGEKSAEKDDKSLEMKGEEKKQNVVNGKQQEQQV

SEQ ID NO: 11392 - protein, 176 aa, Triticum aestivum
DAWARSVLHSTPHPTPARAGAMVALASLSSLCLCGAARRRSASAPTSISCCMLATPSGRGSHESRIPRRRFRRTEGATKSMEDSVKRKMEQFYEGVDGPPLRVLPIGGLGEIGMNCMLVGNCDRYILIDAGVMFPDYDEFGVQKIIPDTTFIKKWSHKIEAVIITHGHEDHILGYP

SEQ ID NO: 11393 - protein, 393 aa, Pseudomonas aeruginosa UCBPP-PA14
MLSNAQRALIKATVPLLETGGEALITHFYRTMLGEYPEVRPLFNQAHQASGDQPRALANGVLMYARHIDQLQELGPLVAKVVNKHVSLQVLPEHYPIVGTCLLRAIREVLGEQIATDEVLEAWGAAYQQLADLLIEAEESVYAASAQADGGWRGVRRFHVARKQAESEEITSFYLEPVDGQPLLAFQPGQYIGLRLDIDGEEVRRNYSLSAASNGREYRISVKREAGGRVSNHLHDRVAEGDELDLFPPAGDFVLRDSDKPLVLITAGVGITPALAMLQEALPQARPIRFIHCARHGGVHAFRDWIEDVSAQHEQVEHFFCYSEPRVGDSPDAEGVLSREKLADWLPQERDLDAYFLGPRPFMAQVKRHLADLGVPSQQCHYEFFGPAAALDA

SEQ ID NO: 11394 - protein, 102 aa, Glycine max
  misc_feature (49)..(49): Xaa can be any naturally occurring amino acid
MEPMDIVGKAKEDASLPKATMTKIIKEMLPPDVRVARDAQDLLIECCVXQDSLKGAKWSNRAEMTEEEALAEQQRMFAEARARMNGGAIPSKQPDAHQSLES

SEQ ID NO: 11395 - protein, 296 aa, Saccharomyces cerevisiae
MITTPLVHVASVEKGRSYEDFQKVYNAIALKLREDDEYDNYIGYGPVLVRLAWLISGTWDKHDNTGGSYGGTYRFKKEFNDPSNAGLQNGFKFLEPIHKEFPWISSGDLFSLGGVTAVQEMQGPKIPWRCGRVDTPEDTTPDNGRLPDADKDAGYVRTFFQRLNMNDREVVALMGAHALGKTHLKNSGYEGPWGAANNVFTNEFYLNLLNEDWKLEKNDANNEQWDSKSGYMMLPTDYSLIQDPKYLSIVKEYANDQDKFFKDFSKAFEKLLENGITFPKDAPSPFIFKTLEEQGL

SEQ ID NO: 11396 - protein, 447 aa, Ehrlichia canis str. Jake
MYKQSWKLLGRGQDADFTVAYINARIIDPESKLDIIGSLLTKGDKIVDFGQDLFNNGIPSTIDEVVDCNNNILMPGLIDIHVHFREPGQEHKETIHTGSKSAAAGGVTTVVCQPNTIPTISSIITAKYIKMRALESAYVNIEFYASITKPDNSLSDMALLKEAGAVGFTDDGMPVMNSLTMRQALSYSSMLDTVVAQHAEDLNLSNNGHINEGTVSYELGLKGIPDISESIIVNRDIALMKNIKNVHYHILHVSSQDSLNIIKQAKNQGLKVTCEVTPHHLTLTEQDVITHGTLAKINPPLRTENDRLSMVEGLKNGIIDCIATDHAPHEVNTKELPLDTAAFGIVGLETMLPISLELYHNGTISLIDLLATLTYKPANIIKVPRGRIKKGFVADLIILDLNHEWTIDILKFASKSKNSPFHNRKVKGKVLRTIVSGKTTYTAVRNI

SEQ ID NO: 11397 - protein, 288 aa, Pediococcus pentosaceus ATCC 25745
MNVFEESYKLSNGVKIPKLALGTWEIDDDQVADAVRSAIEMGYRHIDTAQAYANERGVGEGVRTASVPREEIFVNSKIAAEIKNYDDAKKSIDETLNKMGLDYLDMMIIHNPQPWAEVNQSDDRHFEGNLEVWRALEDAMHEGKLRAIGVSSFQKEDLDNLIKNSDTKPMVNQILSHIAATPMDLINYSHENGIVVEAFSPIAHGQALRSEAIQKMAAKYNVSAPQLSIRYDWQLDTVVLPKTSNPEHMKSNAELDFVISDEDMEILKQVKPLDYGDASVFPVFGGKM

SEQ ID NO: 11398 - protein, 388 aa, Arabidopsis thaliana
MDRISGLPDELLVKIISFVPTKVAVSTSILSKRWESLWKWVPKLECDCTEPALRDFILKNLPLQARIIESLYLRFRRESFLFQDIKLWGGIAISHCLRELRIDFFSHYANPYVILPRSLYTCKSLVTLKLLGLGIRVDVPRDVCLPSLKTLLLQCVAYSEEDPLRLLLSCCPVLEDLVIELDDANQNVKALVVIVPTLQCLSLKIPASCSDERYLIVTPSLKYFKVEDDREIFNALIENMPELEEADIYVTQHIETLLESVTSVKRLTLRQLYNSIDEYKCRAGIVFKQLEQLELSICSDNWTKLVIWLLQNSPNLRVLNLDADSDYERYEEYEQDNWKNIQRSVPKCLKSSLKTLEFAGYTARPEERDFLSFIFKKARCLKTSSISH

SEQ ID NO: 11399 - protein, 473 aa, Ralstonia eutropha JMP134
MKTLDRFYIQGEWVTPAAGSTLVDVINPATEAPVARLAMGTTADADRAVAAARDAFGTWSQSTREERIALLERIAEQYRARVPELAEAVRLEMGAPVTLCNAMQAPIGLVHIQNTLEVLRNFAFETTHGKTWLRREPVGVAALITPWNVPLNQIAAKVAPALAAGCTVVLKPSEIAPLDAVIFAEIMHAAGTPLGVFNMIFGDGPSVGAALSSHPDVDMVSITGSTRAGVEVAKNAAPTVKRVAQELGGKSPLVVLDDADMKTAVTTAVAQCMVNTGQVCVAPTRLLVSRTRYDEALAIAAATAGALQVGDPADPATKIGPLSNRAQFEKVQQMIGIGIEEGARVIAGGPGRPDGIERGFYVRPTVFADVHNSMTVAREEIFGPVLCVIPYDSEEDAIAIANDTVYGLAAYVASGDAERARRVAARLRAGTVRVNFAPADLTAPFGGVKRSGNGREFGAEGLVEFLEWKAISL

SEQ ID NO: 11400 - protein, 371 aa, Listeria monocytogenes str. 1/2a F6854
MDYEKALAFIKSNSTLEQEEGTEVIFKQAQETARGNLDPFLLKDLKQHLGGTNDAIKEAPQEIQMPDFSNLEIATAAALQMRATMGSPNIDLSNGVTTEYRVVEGDYGDIPVRIYRHEEATKPVPAFIFYHGGGFVGGTPAVVENFCKGIAEKLPAVVINVDYHLAPEFPAPAAPKDCYRVLEWVVEQSNELGIDASKIGVSGDSAGGTLAAAVSYMDYEAETNYVGFQALLYPALTLVDEDNEKYQWDISKFGASEDTLPLVAPGIIGMNSSGELLRTAYVRDENPAAPIYSPLSAVDKSIYPPTLIVSAEFDALRAFADVFAKELRASGVQTKAIVYQGMCHAFIDKYGIFPQAEDVADEIVQMMKEIF

SEQ ID NO: 11401 - protein, 223 aa, Thermoplasma acidophilum
MKIFLDTANIDEIRTGVNWGIVDGVTTNPTLISKEAVNGKKYGDIIREILKIVDGPVSVEVVSTKYEGMVEEARKIHGLGDNAVVKIPMTEDGLRAIKTLSSEHINTNCTLVFNPIQALLAAKAGATYVSPFVGRLDDIGEDGMQIIDMIRTIFNNYIIKTQILVASIRNPIHVLRSAVIGADVVTVPFNVLKSLMKHPKTDEGLAKFLEDWKKVSPDGKLIL

SEQ ID NO: 11402 - protein, 304 aa, Ustilago maydis 521
MIFAIKQPFVKTVKSNSYFSRYQVKYRRRREGRTDYYARKRLVSQAKNKYNAPKYRLVVRFSNRYVTCQIVHAKIVGDFVLTQASSKELPRYGVKTGLSNWTAAYATGLLVARRALTLLGLADKYEGVTEPDGEMAEVEPLGDDEPRPFKCFLDVGLKRTSTGSRVFGALKGASDGGIFIPHSEKRFPGFDPEAKELDAELLRSYIYGGHVAEYMESLEEEDDERFKKQFSTALEQDIGSEDLEDMWTEAFEKIREDPSFTPSDKSGKDWAAESKKYKATKLTYEQRKAKIADKIAAFKAGAEL

SEQ ID NO: 11403 - protein, 508 aa, Euphorbia characias
MGFARKEYEFLSEIGLSERNLGCYVNGTWKANGPVVTTSNPANNQAIAEVVEGSIEDYEEGMKACSEAAKIWMQVPAPKRGDIVRQIGDALRGKLEHLGRLVSLEMGKILAEGIGEVQEIIDMCDFCVGLSRQLNGSIIPSERPNHAMLEMWNPLGIVGVITAFNFPCAVLGWNACIALVCGNCAVWKGAPTTPLMTIATTKLVAEVLERNNLPLAIFTSFCGGADIGQAIAKDTRIPLVSFTGSSKVGLMVQQTVNQRYGKSLLELSGNNAIIVMDDADIPLAARSILFAAVGTAGQRCTTCRRLILHEKIYDTVLDQLLKSYKQVKIGDPLEKGTLLGPVHTAESRKNFEKGIELIKSQGGKILTGGSVIESEGNYVQPTIVEISSKAEVVKEELFAPVLYVMKFQTLEEAIEINNSVPQGLSSSIFTRRPDVIFKWLGPHGSDCGIVNVNIPTNGAEIGGAFGGEKATGGGREAGSDSWKQYMRASTCTINYGSELPLAQGINFG

SEQ ID NO: 11404 - protein, 271 aa, Oryza sativa (japonica cultivar-group)
MSPPLEPHDYIGLSAAAASPTPSSSSCSSSPNPGGEARGPRLTLRLGLPGSESPEREVVAAGLTLGPLPPTTTKAASKRAFPDSSPRHGASSGSVAAAAACQDKAAPAAAPPAAKAQVVGWPPVRNYRKNTLAASASKGKGEDKGTAEGGPLYVKVSMDGAPYLRKVDLKMYSSYEDLSMALEKMFSCFITGQSGLRKSSNRDRLTNGSKADALQDQEYVLTYEDKDADWMLVGDLPWDLFTTICRKLKIMRGSDAAGIAPRSIEQSGQSR

SEQ ID NO: 11405 - protein, 181 aa, Fagus sylvatica
MASSMISSATVATVSRATPAQATMVAPFTGLKSTAAFPATQKSNNDITSLASNGGRVQCMKVWPPLGLQKFETLSYLPPLSLESLAKQIEYLILKGWIPCLEFELEHPFVYRENNRSPGYYDGRYWVMWKLPMFGCTDATQVLAELQEASKTYPTSHIRIIGFDNKRQVQCISFIAYKPPK

SEQ ID NO: 11406 - protein, 315 aa, Oryza sativa (japonica cultivar-group)
MADHAAAEAAPQSSQEEEEDWKEAEGGDGDVEVADRGGGGGAANGGIPEGRPIRVYADGIYDLFHFGHAKSLEQAKRLFPNTYLLVGCCNDELTHKYKGRTVMTEDERYESLRHCKWVDEVIPDAPWVVTEEFLNKHNIDFVAHDSLPYADASGAGNDVYEFVKKLGKFKETQRTDGISTSDIIMRIVKDYNEYVMRNLARGYTRKDLGVSYVKEKRLRVNMGLKNLRDKVKQHQEKVGEKWNTMAKLQEEWVENADRWVAGFLEKFEEGCHSMGTAIKERIQERLKAQSRDFSLLQYDGEDVDEDEDDDEYVRE

SEQ ID NO: 11407 - protein, 342 aa, Haemophilus influenzae R2866
MKERIKAICLEKPNNVVVKEVPYPEKSDNDVLIQVESMGICGSDIGAYRGTNPLVTYPRILGHEIVGRVIESGIGMPDRVRVGDRVIVDPYVFCGQCYPCSIGRTNCCESLKVIGVHIDGGMQEVIRHPAHLLTKVPDNLPIHQLPLAEPLTIALHALHRTTLKSGEHIVIIGAGAIGLMAALAAVQYGAIPILVDILEQRLEYAKSLGIEHIVNPHKEDDIKRIKEITSGRMAEVVMEASGANISIKNTLHYTSFAGRIALTGWPKTETPLPTNLITFKELNIYGSRTSKGEFEEALDMLATNKINASHIITKCIKFEEIPSFISDLSDHPENYLKINAVF

SEQ ID NO: 11408 - protein, 488 aa, Listeria monocytogenes str. 4b F2365
MSIKETALPKVQTKLFINGKWTDGDNKETKDIVNPANGEVIAKIAQAGPNETKKAIKAAKEAFPDWAKMELADRVKLLHKIADLMEEKADTLAKIMTLEQGKPLKESKGEVLTGAENFRFAAEEARRLYGETIPAPNNHAFIVKKQPIGVVAAITPWNFPGGMVTRKLAPALATGNTIVLKPSGDTPLSALAIFEIFEEAGLPKGVANIVMGSSKEIGETLTDSDDVRKLTFTGSTKVGQTLFKQSAETLKKISLELGGHAPFIVFDDANLDAAVNDLVAAKFRNNGQVCVSPNRIFVAKEIKEKFTKALVAKVEQLKVGNGLDDVNVGPLIREDAIDKIDKQLKNATDKGAKVLTGGGRLTGSDYDKGNFYKPTVLDNVTREMDIFYEETFGPVIPLITFETEDEAIEMANDSEFGLASYFYTKDLARVEKVGAALEYGMVGANEIAISNPETPFGGVKHSGFGRENGHYGMEEYIQVKFINLKYRD

SEQ ID NO: 11409 - protein, 112 aa, Bartonella sp. Bi4298tl
ANEACLKMLQEIGSIKRIPKFIARAKDKNDPFRLIGFGHRVYKNYDPRAKIMQKTCHEVLKELNIQDDPLLDIAIELEKIALNDEYFIEKKLYPNVDFYSGIILKALGFPTE

SEQ ID NO: 11410 - protein, 185 aa, Triticum aestivum
  misc_feature (85)..(85): Xaa can be any naturally occurring amino acid
  misc_feature (87)..(87): Xaa can be any naturally occurring amino acid
  misc_feature (143)..(143): Xaa can be any naturally occurring amino acid
  misc_feature (152)..(152): Xaa can be any naturally occurring amino acid
TTLDCGGGLGIDYDGTRSADSDISVAYGLEEYASSIVQAVRTTCDKAMVSHPVLCTESGQAMVSHHSMIILESLSAIPEPKDDDXDXTPEQLRTKIQHHYSCFQLADVRQQSWDLQEARDSRRYKLAKNSPKDFPATPHIYNXHMNSPSSPXLPDVWGIKWRSRLSCRSMRTYPNDTSTNCDSTA

SEQ ID NO: 11411 - protein, 112 aa, Bartonella sp. Rl5132tl
ANEACLKMLQEIGSIKRNPEFIARAKDKNDPFRLIGFGHRVYKNYDPRAKIMQKTCHKVLKELNIQDDPLLDIAIELEKIALSDEYFIEKKLYPKVDFYSGIILKALGLPTE

SEQ ID NO: 11412 - protein, 296 aa, Gloeobacter violaceus PCC 7421
MESEYSNLIQWYPGHIAKARRQLAEQLKQVDLVLEVLDARIAHSSRHDEIQKLAGERPRLVVLNRADMIPQGMLRSWLKWFAARGEAAYPTNAQNGDGVRAVLKAAQQGAVAVNQRRAGRGMRPRAVRVAVIGFPNVGKSALINRLVGKRAVESAAKPGVTRALRWVRIADVIDLLDSPGILPPRLNDQRAAAKLAICDDIGQAAYTTSRVATLAAELLTPLVPRRLAERFGADPLAVTAEEWLEQVARHKYHGNLDRAAEALLGDFRRGQLGAIALEAPPEEPLVPQAEAECEEG

SEQ ID NO: 11413 - protein, 235 aa, Glycine max
MTGTKRNQITTSPVGSPTSGNISDSYSSKEQDRFLPIANVSRIMKRALPANAKISKEAKETVQECVSEFISFITGEASDKCQREKRKTINGDDLLWAMTTLGFENYVGPLKLYLNNYRETEGEKSSTSMAKQEELHSPTHQHQTNIDGVVEINKLLPHSVAAATKASDFNNTTFSAGGFYSVGPHQVTAPKSFTEMGGLNGYRESSIAQSALSADQIQDASGNRMMPPILRYRVE

SEQ ID NO: 11414 - protein, 223 aa, Cucumis melo
MAAAPSVREENVYVAKLAEQAERYEEMVEFMEKVSASLDKEELTVEERNLLSVAYKNVIGARRASWRIISSIEQKEESRGNDDHVSVIRDYRSKIETELSNICDGILKLLDSRLIPSAASGDSKVFYLKMKGDYHRYLAEFKTGAERKEAAESTLTAYKAAQDIANAELPPTHPIRLGLALNFSVFYYEILNSPDRACSLAKQAFDEAIAELDTLGEESYKDS

SEQ ID NO: 11415 - protein, 112 aa, Bartonella sp. Bi4251tl
ANEACLKMLQEIDSVKRIPKFIARAKDKNDPFRLMGFGHRVYKNYDPRAKIMQQTCHEVLKELNIQDDPLLDIAIELEKIALNDEYFVEKKLYPNVDFYSGITLKALGFPTE

SEQ ID NO: 11416 - protein, 160 aa, Thermoplasma acidophilum DSM 1728
MVFKRKEAGITDYSKRLKLLKSREKRFIVRITGKGVIAQVAEYSDIGDRILFTVTDKTLAKYGVDLRGNNIQVCYLVGYIAGIESEKNGVESAVLDTGRRKFRKGGRIAACLKGFTDAGIEVPHGEDVFPDKKRIDGKHLKSPVKISEIVKNFKKMEEKA

SEQ ID NO: 11417 - protein, 506 aa, Pseudomonas fluorescens PfO-1
MRYAHPGTEGAKVSFKSKYGNYIGGEFVAPVKGQYFTNTSPVNGQPIAEFPRSTAEDIEKALDAAHAAADAWGSTSAQARSLILLKIADRIEQNLETLAIIETWDNGKAIRETLNADIPLAADHFRYFAGCLRAQEGSAAEIDGNTVAYHIHEPLGVVGQIIPWNFPILMAAWKLAPALAAGNCVVLKPAEQTPLGISVLLELIGDLLPPGVLNVVQGFGKEAGEALATSKRIAKIAFTGSTPVGSHIMKCAAENIIPSTVELGGKSPNIFFEDIMQAEPSFIEKAAEGLVLAFFNQGEVCTCPSRALVQESIYPQFMEAVMKKVSQIKRGDPLDTDTMVGAQASEQQFDKILSYLEIAKGEGAELLTGGKVEKLEGSLATGYYIQPTLLKGTNKMRVFQEEIFGPVVSITTFKDEAEALAIANDTEFGLGAGLWTRDINRAYRMGRAIKAGRVWTNCYHLYPAHAAFGGYKKSGVGRETHKMMLDHYQQTKNLLVSYDINPLGFF

SEQ ID NO: 11418 - protein, 433 aa, Ralstonia eutropha JMP134
MTPSDVKATLSFSDGSPSVELPIYKGTVGPDVIDIRKLYGQTGKFTYDPGFMSTASCNSKITYIDGDKGELLYRGYPIEQLAQKCDHLETCYLLLKGELPNAKQKEEFTGHVMNHTMVHEQLQFFLRGFRRDAHPMAVLTGLVGAMSAFYHDAMDIDDPHQREISAIRLIAKMPTMVAMAYKYNIGQPYIYPQNDLSYSGNFLRMLFGTPCAPYTVNPVLERALDRIFILHADHEQNASTSTVRLAGSSGTNPFAAIAAGVACLWGPAHGGANEAALKMLEEIGSVDNIGEFIKQVKDKNSGVRLMGFGHRVYKNYDPRAKLMRETCHEVLNELGLHNDPLFKLAMELEKIALEDEYFVSRKLYPNVDFYSGIVQRALGIPTSLFTCIFALARTPGWISQWEEMITDPEYKIGRPRQLFNGAASRDVPDISKR

SEQ ID NO: 11419 - protein, 411 aa, Anaplasma platys
MKENAVLMCGDKKVSLPMLSGTDGIQLIDITTLYRDHKVLTYDPGFMSTAACSSEITFIDGEKGILRHRGLDIADLIGIKGGFCSVAHLLLYGVLPSDTVFEQFLAAIGAQHALSSDVLGVISSFRRDAHPMAILMACFSTLAAKYHGDNRGNEELAVLAIAQVPSLVAAIYLHRMGLELVSPDPSLSYTGNFVKMMFGALEKTRADAIEEALDAIFIMHADHEQNASTATVRMAGSAGTELFACLAAGTATLWGPAHGGANEAVIRMLESIGSPDKVEEFIGFVKDNNSKVRLMGFGHRVYKSYDPRAKILGQISRSVLDNLGCSDELLGVAEELERCALQDEYFVERKLYPNVDFYSGIVLRAMGVPVEMYTTFFALARTAGWVSQWCELLRGSESLKICRPRQLYAGK

SEQ ID NO: 11420 - protein, 367 aa, Bacillus megaterium
MTKKVAVLPGDGGQSNQRRCCRLKAIGERLRHQFEFTYGLIGGAAIDEAGSSSSRSTIETCNEADAVLLGSVGGPKWDRFPSHLRPEKGLLAIRKELDLYANLRPVTFYDSLADASPLKKEYIEGVDFIIVRELTGGLYFGKPSDRRTEGNKETVVDTLFYKRTEIERIIASIDTAVNRRKKVTSVDKANVLESSRVWREVAEEVAKDYPDVELEHMLVDSAAMQLIRNPKYFDVVVTENMFGDILSDEASMLTGSLGMLPSASLTADGPSLYEPVHGSAPDIAGQNKANPIAAAILSAAMLLRHSFGLEKEAAVIEQAVESVLHAGHRTADLADGNHYLGTDKMVEVITAVIANDSAISSIMTASR

SEQ ID NO: 11421 - protein, 474 aa, Aspergillus nidulans FGSC A4
MASTLRLSTSALRSSTLAGKPVVQSVAFNGLRCYSTGKTKSLKETFADKLPGELEKVKKLRKEHGNKVIGELTLDQAYGGARGVKCLVWEGSVLDSEEGIRFRGLTIPECQKLLPKAPGGEEPLPEGLFWLLLTGEVPSEQQVRDLSAEWAARSDLPKFIEELIDRCPSTLHPMAQFSLAVTALEHESAFAKAYAKGINKKEYWHYTFEDSMDLIAKLPTIAAKIYRNVFKDGKVAPIQKDKDYSYNLANQLGFADNKDFVELMRLYLTIHSDHEGGNVSAHTTHLVGSALSSPMLSLAAGLNGLAGPLHGLANQEVLNWLTEMKKVVGNDLSDQSIKDYLWSTLNAGRVVPGYGHAVLRKTDPRYTSQREFALRKLPDDPMFKLVSQVYKIAPGVLTEHGKTKNPYPNVDAHSGVLLQYYGLTEANYYTVLFGVSRALGVLPQLIIDRAFGAPIERPKSFSTEAYAKLVGAKL

SEQ ID NO: 11422 - protein, 306 aa, Hevea brasiliensis
MPSHGDLDRQIEHLMECKPLPEARGQTLCDQARAILVEEWNVQPVKCPVTVCGDIHGQFYDLIELFRIGGNAPDTNYLFMGDYVDRGYYSVETVTLLVALKVRYRDRITILRGNHESRQITQVYGFYDECLRKYGNANVWKYFTDLFDYLPLTALIESQIFCLHGGLSPSLDTLDNIRALDRIQEVPHEGPMCDLLWSDPDDRCGWGISPRGAGYTFGQDIAAQFNHTNGLTLISRAHQLVMEGYNWCQEKNVVTVFSAPNYCYRCGIMAAILEIGENMAQNFLQFDPAPRQIEPDTTRKTPDYFL

SEQ ID NO: 11423 - protein, 118 aa, Glycine max
MATLDSDVTVFPAGEASSSAGPSSSTKKPKRFEIKKWNAVSLWAWDIVVDNCAICRNHIMDLCIECQANQASATSEECTVAWGVCNHAFHFHCISRWLKTRQVCPLDNSEWEFQKYGH

SEQ ID NO: 11424 - protein, 393 aa, Ralstonia eutropha JMP134
MSAANHTTPADAPQSAGPKPKKSVALSGVTAGNTALCTVGRTGNDLHYRGYDILDVADACEFEEIAHLLVHGKLPNRAELAAYKTKLKSLRGLPANVKAALEWVPASAHPMDVMRTGVSVLGTVLPEKDDHNAPGARDIADRLMASLGSMLLYWYHYSHNGRRIEVETDDDSIGAHFLHLLHGEKPSKLWERAMHTSMILYAEHEFNASTFTGRVIAGTGSDMYSAICGAIGALRGPKHGGANEVAFEIQKRYDSPDEAQADIARRVENKEVVIGFGHPVYTIADPRNQVIKETARNLSKDAGSMKMFDIAERLETVMWDIKKMFPNLDWFSAVSYHMMGVPTAMFTPLFVIARTSGWAAHIIEQRIDNKIIRPSANYTGPEDLKFVPIGKRK

SEQ ID NO: 11425 - protein, 346 aa, Shigella flexneri 2a str. 301
MKSVVNDTDGIVRVAKSVIPEIKHQDEVRVKIASSGLCGSDLPRIFKNGAHYYPITLGHEFSGYIDAVGSGVDDLHPGDAVACVPLLPCFTCPECLKGFYSQCAKYDFIGSRRDGGFAEYIVVKRKNVFALPTDMPIEDGAFIEPITVGLHAFHLAQGCENKNVIIIGAGTIGLLAIQCAVALGAKSVTAIDISSEKLALAKSFGAMQTFNSSEMSAPQMQSVLRELRFNQLILETAGVPQTVELAVEIAGPHAQLALVGTLHQDLHLTSATFGKILRKELTVIGSWMNYSSPWPGQEWETASRLLTERKLSLEPLIAHRGSFESFTQAVRDIARNAMQGKVLLIP

SEQ ID NO: 11426 - protein, 221 aa, Brassica napus
  misc_feature (120)..(120): Xaa can be any naturally occurring amino acid
METLATDPGFIDSGVYLRLGLIVEGKIRLKKPPTLLSRLASSLERSLLLHDESPPEFQHSAVTVFDGRSPPEITISDYLDRIFIYSRCSPSCFVAAYIYILQFLDVTRAHLTPLNVHRLXVTSVMLAAKVFDDRYYNNAYYARVGGVSPRELNRLEMKLLFALDFKLQVDPHTFHAHCCQLEKQNSDGIQIEWPIKEACRLDKETWRKSTPESVCSQTTAR

SEQ ID NO: 11427 - protein, 418 aa, Bordetella parapertussis 12822
MSYQHIKVPTGGQKITVNADYSLNVPDQVIIPVIEGDGTGADITPVMIKVVDAAVQKAYAGKRKIHWMEVYAGEKATKVYGPDVWLPEETLDAVKDYVVSIKGPLTTPVGGGIRSLNVALRQQLDLYVCLRPVRYFKGVPSPVREPEKTDMVIFRENSEDIYAGIEYMAESEQAKDLIQYLQTKLGATKIRFPNTSSIGIKPVSREGTERLVRKALQYAIDNDRASVTLVHKGNIMKFTEGGFRDWGYALAQNEFGAQPIDGGPWCKFKNPKTGREIIVKDSIADAFLQQILLRPAEYDVIATLNLNGDYISDALAAQVGGIGIAPGANLSDSVAMFEATHGTAPKYAGKDYVNPGSEILSAEMMLRHMGWTEAADLIIASMEKSILSKKVTYDFARLLEGATQVSCSGFGQVMIDNM

SEQ ID NO: 11428 - protein, 278 aa, Glycine max
MGVFSEDPNPNPNPIVIREVWASNLESEFELIRELIDRYPFISMDTEFPGVIFRPHVDPTKPFNHRNRPSDHYRLLKSNVDALNLIQVGLTLTDAAGNLPDLAGNRSIWEFNFRDFDVARDAYAPDSIDLLRRQGIDFARNTADGVDSTRFAELMMSSGLVCNDSVSWVTFHSAYDFGYLVKILTRRNLPTRLEEFLKTVKVFFGDNVYDVKHMMRFCDTLYGGLDRVARTLNVERAVGKCHQAGSDSLLTWHAFQKIVDIYFVKDEHRKHAGVLYGL

SEQ ID NO: 11429 - protein, 165 aa, Triticum aestivum
  misc_feature (58)..(58): Xaa can be any naturally occurring amino acid
  misc_feature (72)..(72): Xaa can be any naturally occurring amino acid
  misc_feature (76)..(76): Xaa can be any naturally occurring amino acid
  misc_feature (81)..(81): Xaa can be any naturally occurring amino acid
  misc_feature (100)..(100): Xaa can be any naturally occurring amino acid
  misc_feature (109)..(109): Xaa can be any naturally occurring amino acid
  misc_feature (111)..(111): Xaa can be any naturally occurring amino acid
  misc_feature (123)..(123): Xaa can be any naturally occurring amino acid
  misc_feature (130)..(130): Xaa can be any naturally occurring amino acid
MAPTVMASSATSVAPFQGLKSTAGLPVSRRSNGASLGSVSNGGRIRCMQVWPIEGIKXFETLSYLPPLSTEXLLKXVDYLXRSKWVPCLQFNKVGFIFPXAQPSPGYYXGXYWTIWNCLCSGXTEATQVXTSGRSRRIPDPIPITVSQVILTHPQLKIRKLITSI

SEQ ID NO: 11430 - protein, 101 aa, Glycine max
MSGRVSGKVKWFNDQKGFGFITPDDGSEELFVHQSQIKSDGFRSLAEGESVEFAIESESDGRAKAVDVTGPDGASVQGTRRGGGDRYGGSGGGGGRYGGGA

SEQ ID NO: 11431 - protein, 174 aa, Triticum aestivum
  misc_feature (84)..(84): Xaa can be any naturally occurring amino acid
MPESDNDSGGPSNTGGEGELSSPREQDRFLPIANVSRIMKKALPANAKISKDAKETVQECVSEFISFITGEASDKCQREKRKTXINGDDLLWAMTTLGFEDYVDPLKHYLHKFREIEGERAAATSTSTTPHLPDNNATGYADYGGADVPAPGPGRHEDDGPPHLPLHASAAPSN

SEQ ID NO: 11432 - protein, 116 aa, Brassica napus
MGSTPAEVPCEDVADNRSGVGGGISDVYGEDLATLDQLVTPWVTSVASGYSLMRDPRYNKGLAFTDKERDAHYLTGLLPPVVISQEVQERKLMHNLRQYTVPLQRYMALMDLQEKE

SEQ ID NO: 11433 - protein, 301 aa, Zea mays
MAGLSLEHPWAFAFGLLGNVISFMTFLAPIPTFYRIYKSKSTEGFQSVPYVVALFSAMLWIFYALIKSNETFLITINAAGCVIETIYIVMYFVYAPKKAKLFTAKIMALVNGGVFGVILLLTLLLFKGSKRVVLLGWICVGFSVSVFVAPLSIMRRVIQTKSVEYMPFSLSLSLTLSAVVWFLYGLLIKDKYVALPNVLGFIFGVVQMVLYVLYMNKTPVAAAVGKDAGKLPSAADEHVLVNIAKLNPALPERTSGMHPVTQMAAVPARSCAAEATAPAMLPNRDVVDVFVSRHSPAVHVV

SEQ ID NO: 11434 - protein, 185 aa, Brassica napus
MSCTATDLAVLLGPNATAAADYICGQLGTVNSKFTDVAFAVDNTYLLFSAYLVFSMQLGFAMLCAGSVRAKTTMNIMLTMTNVLDAAAGGLFYYLFGYAFAFGSPSNGFIGKHNFGLKDFPSASADYSNFLYQWAFAIAAAGITSGSIAERTQFVAYLIYSSFLTGFVYPVVSHWFWSVDGWASP

SEQ ID NO: 11435 - protein, 449 aa, Pyrococcus furiosus DSM 3638
MDKRSQKTYKGFYRTLEIQKKFKNQDLSNQILVISMEVVLEGKFLLDKRTIEGYIGIEDGKISKISLREIKGDHKIKVDKGKVILPGLIDVHVHLRDFEESYKESIESGTKAAVHGGITVVFDMPNTKPPIMDEKTLKLREHLFKRKSYADYALGFLLAGNKPVEADFYKIFMGASTGGIYSKNFEEDYIRALDIVSIHAEDYEIIQKYPERPPIAEIRAIERVIEAVKTHKKPAHICHISTAKGLKLLLDSRLEMLSFEVTPHHLFLTRSDYDKNPLLKVYPPLRSEEDRIALWKNIDKVPVIASDHAPHTLEDKEAGAAGLPGLETEVPLLLDAVNKGLITLQDIVEKMHINPIKIFGIENKGFEKGKDADFTIVDMKREWTIRADNLYTKAGWTPYEGWRVKGKVIMTIIRGEVVMEEDEIIGKPRGERIVKKGKHRRNLGSSEEH

SEQ ID NO: 11436 - protein, 194 aa, Zea mays
ILRTNAHRSSGLSNFFVSSNAGVALYIFLIILPFLVLCPLRYYHQKHPVNLLLLGLFTVAISFAVGMTCAFTSGKIILEAAILTAVVVISLTAYTFWAAKRGHDFNFLGPFLFAAIMVLMVFSLIQIFFPLGKISVMIYGGLASLIFCGYIIYDTDNVIKRYTYDEYIWAAVSLYLDVINLFLSLLQLLRAADS

SEQ ID NO: 11437 - protein, 492 aa, Thermobifida fusca
MSISSERIAALRDYVPEVRELTIDGKPVKPAGETWDVYNPATEEVIATVSGATKEQVDEAIRAARTAFDTWSKMSGEERSAAMHSLADRLEARWEELLASIVNEVGTPVSTAEFLQVKMGLGHLRWFADAAKKDRTVHLGPYDVPVPTMSDVDHYPVGVVAAITGYNYPLNLAGFKYGAALAAGCTVVLLPSPRTPLTTLLLGEIIRESDLPDGVINVVLGGADIGQYLSSHPGVDKVSFTGSDAVGAKIMEQAAANLNDVVLELGGKSANIVLPGCDVESFAVDMHMRWSRNSGQGCAALARLLVHEDLFDRFMKAGAEAFPKMKVGDPWDPETHIGPLIRPDHRDRVNGFITEALEQGGKALLQVETPLPEKGWYVNPILLGNLPHSARAVQQEIFGPVAVVLTYKDVDEAIRLANDTAYGLAANVWAPTLEEGRRVAEQLRAGTVWINGGGAMRPDAPFGGSGRSGIGRELGEWGIQEFLEPRHIQWAL

SEQ ID NO: 11438 - protein, 165 aa, Aegilops speltoides
VMASSATTVAPFQGLKSTAGLPVGRRSSGSLGSVSNGGRIRCMQVWPIEGIKKFETLSYLPPLSTEALLKQVDYLIRSKWVPCLEFSKVGFVFREHNSSPGYYDGRYWTMWKLPMFGCTDATQVLSEVEEVKKEYPDAYVRVIGFDNLRQVQCVSFIAFRPPGCE

SEQ ID NO: 11439 - protein, 54 aa, Zea mays
MSTATFVDIIIAILLPPLGVFLRFGCGVEFWICLVLTLLGYIPGIIYAIYVLTK

SEQ ID NO: 11440 - protein, 165 aa, Aegilops sharonensis
VMASSATTVAPFQGLKSTAGLPVSRRSSASLGSVSNGGRIRYMQVWPIEGIKKFETLSYLPPLSTEALLKQVDYLIRSKWVPCLEFSKVGFVFREHNSSPGYYDGRYWTMWKLPMFGCTDATQVLNEVEEVKKEYPDAYVRVIGFDNLRQVQCVSFIAFRPPGCE

SEQ ID NO: 11441 - protein, 164 aa, Aegilops bicornis
VMASSATSVAPFQGLKSTGGLPVSRRSRGSLGSVSNGGRIRCMQVWPIEGIKKFETLSYLPPLSTEALLKQVDYLIRSKWVPCLEFSKVGFVFREHNSSPGYYDSRYWTMWKLPMFGCTDATQVLNEVEEVKKEYPDAYVRVIGFDNLRQVQCVSFIAFRPPGC

SEQ ID NO: 11442 - protein, 196 aa, Triticum aestivum
MPDSDNDSGGPSNADFSSPKEQDRFLPIANVSRIMKKALPANAKISKDAKETVQECVSEFISFITGEASDKCQREKRKTINGDDLLWAMTTLGFEDYMEPLKLYLHKFRELEGEKAGGEAGGYGGMYGGAGAGGSGGGMFMMMGQPMYGSPPAAGYQHPQHHHQMMTGGQGGYGYGDAGAGGGSSSSSGFGRQDRA

SEQ ID NO: 11443 - protein, 352 aa, Enterococcus avium
MSKTMKGVSKQAPGYDQMAFIDLSVPEATDDKVLIKVAYTGICGSDIHTFKGEYKNPTTPVVLGHEFSGQVVEVGANVPKVKVGDRVTSETTFYVCGECDYCKEKQYNLCPHRKGIGTQQNGSMANYVLAREESIHLLPDHLSYEGAAMSEPLACCVHAMYQKSHLELKDTIIIMGPGPIGLYLLQIAKEIGAFVIMTGITKDAHRLALAKKLGADVIVDTMKEDLAKVVNEITDGYGVDKVYDASGAVPAVNASLPLIRKQGQFIQVGLFANKMVDLDTESIIQREIEYIGSRSQNPYDWPIAIHLLAKGAINIDEMITKKYPLTEWREAFDKVMEGNEIKVMIESNPEEF

SEQ ID NO: 11444 - protein, 296 aa, Saccharomyces cerevisiae
MITTPLVHVASVEKGRSYEDFQKVYNAIALKLREDDEYDNYIGYGPVLVKLAWHISGTWDKHDNTGGSYGGTYRFKKEFNDPSNAGLQNGFKFLEPIHKEFPWISSGDLFSLGGVTAVQEMQGPKIPWRCGRVDTPEDTTPDNGRLPDADKDAGYVRTFFQRLNMNDREVVALMGAHALGKTHLKNSGYEGPWGAANNVFTNEFYLNLLNEDWKLEKNDANNEQWDSKSGYMMLPTDYSLIQDPKYLSIVKEYANDQDKFFKDFSKAFEKLLENGITFPKDAPSPFIFKTLEEQGL

SEQ ID NO: 11445 - protein, 188 aa, Zea mays
  misc_feature (159)..(159): Xaa can be any naturally occurring amino acid
  misc_feature (176)..(176): Xaa can be any naturally occurring amino acid
MARRTRFVAIAALLTSFLNVAAGHPRPLSGAGLPGDLFGLGIASRIRTDSNSTAKAATDFGQMVRAAPEAVFHPATPADIAALVRFSATSAAPFPVAPRGQGHSWRGQALAPGGVVVDMGSLGRGPRINVSAVAGAEPFVDAGGEQMWVEVLRATLGPXVLMPRERTEYLRLTVSXTLSNAIIYEKEF

SEQ ID NO: 11446 - protein, 474 aa, Azoarcus sp. EbN1
MQVFDMIINGKPVRAGSTFDVVNPATGEVFARVQAGDASHVDQAVAAARAAFPGWSRTPDAERKRLMHALGAALEAHMPELMELVTKEAGKPLGGLNGVGSGMEVGGAIAWTHVTADLELPVEVIQDNDDARIEVHRKPLGVVGSITPWNWPLMIAIWHVIPALRAGNTVVIKPSGMTPTATIRFVELANAILPPGVLNIVTGESGVGSAIAKHPDINKIVFTGSTPTGKNIMQNAAGNLKRLTLELGGNDAGIVLPDVDPKAIAPKLFGVGFHNNGQTCACLKRLYVHDSIYEKVCAELARIAKETVVGDGLVEGTELGPVQNKAQLDFVQELVEDARAHGARILSGGKARSGGGFFFEPTVIADAKDGMRVVDEEQFGPVLPVIRYSDIEEVIARANNNENGLGGSIWSKDHAKAAELALRLECGTAWVNEHGAVQPDAPFGGVKQSGLGVEFGRYGLEEYTSIQTLKIMKA

SEQ ID NO: 11447 - protein, 136 aa, Brassica napus
RKVTAFLGGIHLCDGRYDTPEHRILHDLDTVFKDDFHNPTYPVGTKAPRQPWHDLHCRLQGPAAYDVLTNFAQPRTKATRWKEFSLRLKGKTHWQDDALIRIGRISWILSPVFKYLKDGTNMVPEDDPIVYVSKED

SEQ ID NO: 11448 - protein, 171 aa, Triticum aestivum
RFKCFPPIRDAANKENLWEALLDGHIDMLSSDHSPSTPDLKLEGERDSVSARGGISSLQFVLPVTWSHGKKYGITLNQLASWWSEKPAELAGQKNKGSILPGYHADIVVWKPEVQFHLDDTHAVYHKHRNISAYIGKELSGKVLSTFVRGNLVFAEGKHAGAACGATILAK

SEQ ID NO: 11449 - protein, 508 aa, Burkholderia cepacia R18194
MNPFDLKQLGLDVEYPYRQQYDNYIGGKWVPPVKGEYFENVSPINGQPFCRIPRSGTDDIELALDAAHAARRKWGKTSVAERANLLLAAADRMEKNLKLLAVAETIDNGKPLRETMAADLPLAVDHFRYFAGCIRAQEGGISEIDDNTVAYHFHEPLGVVGQIIPWNFPLLMAAWKLAPALAAGCCVVMKPAEQTPASVLVLMELIGDLFPAGTINIVNGFGKEAGEALATSKRIAKIAFTGSTPVGKHILRAAADSLIPSTVELGGKSPNIFFADVLDQDDAFLDKALEGLAMFALNQGEVCTCPSRILIQESIYEKFIEKAVARVERIKAGHPLDLQTMIGAQASQQQLDKILSYIDIGRGEGAQCLTGGERTAPAAELGTGYYVKPTMLLGNNKMRVFQEEIFGPVASVMTFKDEQDAIELANDTFYGLGAGVWTRNGTRAYRMGREVEAGRVWTNCYHLYPAHAAFGGYKQSGIGRETHKMALSNYQQTKCLLVSYQAEALGFF

SEQ ID NO: 11450 - protein, 275 aa, Escherichia coli
MANPTVIKLQDGNVMPQLGLGVWQASNEEVITAIQKALEVGYRSIDTAAAYKNEEGVGKALKNASVNREELFITTKLWNDDHKRPREALLDSLKKLQLDYIDLYLMHWPVPAIDHYVEAWKGMIELQKEGLIKSIGVCNFQIHHLQRLIDETGVTPVINQIELHPLMQQRQLHAWNATHKIQTESWSPLAQGGKGVFDQKVIRDLADKYGKTPAQIVIRWHLDSGLVVIPKSVTPSRIAENFDVWDFRLDKDELGEIAKLDQGKRLGPDPDQFGG

SEQ ID NO: 11451 - protein, 298 aa, Thermotoga maritima MSB8
MGSDKIHHHHHHMQVPKVTLNNGVEMPILGYGVFQIPPEKTEECVYEAIKVGYRLIDTAASYMNEEGVGRAIKRAIDEGIVRREELFVTTKLWVSDVGYESTKKAFEKSLKKLQLEYIDLYLIHQPFGDVHCAWKAMEEMYKDGLVRAIGVSNFYPDRLMDLMVHHEIVPAVNQIEIHPFYQRQEEIEFMRNYNIQPEAWGPFAEGRKNIFQNGVLRSIAEKYGKTVAQVILRWLTQKGIVAIPKTVRRERMKENISIFDFELTQEDMEKIATLDEGQSAFFSHRDPEVVKWICSLKR

SEQ ID NO: 11452 - protein, 452 aa, Staphylococcus aureus subsp. aureus MRSA252
MNYTQQLKQKDSEYVWHPFTQMGVYSKEEAIIIEKGKGSYLYDTNGNKYLDGYASLWVNVHGHNNKYLNKVIKKQLNKIAHSTLLGSSNIPSIELAEKLIEITPSNLRKVFYSDTGSASVEIAIKMAYQYWKNIDREKYAKKNKFITLNHGYHGDTIGAVSVGGIKTFHKIFKDLIFENIQVESPSFYRSNYDTENEMMTAILTNIEQILIERNDEIAGFILEPLIQGATGLFVHPKGFLKEVEKLCKKYDVLLICDEVAVGFGRTGKMFACNHEDVQPDIMCLGKAITGGYLPLAATLTSQKIYNAFLSDSHGVNTFFHGHTYTGNQIVCTVALENIRLYEKCKLLSQIETTSSTLEKQLHALKRHRNVGDVRGRGLMFGVELVTDKDSKTPLEIEKVERIVRNCKENGLMIRNLENVITFVPVLSMSNKEVKTMVRIFKKAVHNILDRKC

SEQ ID NO: 11453 - protein, 364 aa, Zea mays
MGSTAGDVAAVVDEEACMYAMQLASSSILPMTLKNAIELGLLEVLQKEAGGGKAALAPEEVVARMPAAPSDPAAAAAMVDRMLRLLASYDVVRCQMEDRDGRYERRYSAAPVCKWLTPNEDGVSMAALALMNQDKVLMESWYYLKDAVLDGGIPFNKAYGMTAFEYHGTDPRFNRVFNEGMKNHSVIITKKLLDFYTGFEGVSTLVDVGGGVGATLHAITSRHPHISGVNFDLPHVISEAPPFPGVRHVGGDMFASVPAGDAILMKWILHDWSDAHCATLLKNCYDALPENGKVIVVECVLPVNTEATPKAQGVFHVDMIMLAHNPGGKERYEREFRELAKGAGFSGFKATYIYANAWAIEFIK

SEQ ID NO: 11454 - protein, 53 aa, Glycine max
HWDLPRTREGFYRFKGSETASGVRGCAFSAHADVIWMETAPPNVDECTSYARG

SEQ ID NO: 11455 - protein, 159 aa, Triticum aestivum
  misc_feature (72)..(72): Xaa can be any naturally occurring amino acid
  misc_feature (89)..(89): Xaa can be any naturally occurring amino acid
  misc_feature (100)..(100): Xaa can be any naturally occurring amino acid
  misc_feature (128)..(128): Xaa can be any naturally occurring amino acid
  misc_feature (138)..(138): Xaa can be any naturally occurring amino acid
MAPTVMASSATSVAPFQGLKSTAGLPVSRRSNGASLGSVSNGGRIRCMQVWPIEGIKNSETLSYLPPLSTEXLLKQVDYLIPSKWVLAXRFSKVGSSSRXAQPSPGYYDGRYWTCWNCYVPGALTHTXINEVEESRRXPDPIPHRFHKSQVHAHSPSTT

SEQ ID NO: 11456 - protein, 284 aa, Triticum aestivum
AAAAIAGAFLRLAGRPAVLPSNNLSYSENFLYMLDSLGDKEYKPNPRLARVLDILFILHAEHEMNCSTAAVRHLASSGVDVFTALSGAVGALYGPLHGGANEAVLKMLNEMGAVENIPDFIEGVKNRKRKMSGFGHRVYKNYDPRAKVIRKLAEEVFSIVGRDPLIEVAVALEKAALSDEYFIKRKLYPNVDFYSGLIYRAMGFPTEFFPVLFAIPRMAGWLAHWKESLDDPDNKIMRPQQVYTGVWLRHYTPVRERVASNQGEELGQIATSNATRRRRAGSSL

SEQ ID NO: 11457 - protein, 427 aa, Haemophilus somnus 2336
MSKLTAKLTLSDGREFDLNVQQGTLGYDAVDVQPLVKNKLFTFDPGFMSTASCVSEITYIDGDNGILLHRGYPIADLAKNADYLEVAHLLLFGERPNKEEYANFIKLVKNHTLVHEQISRFFHGFRRDSHPMAIMCGVSGALAAFYHDSLDINDIEHRELTAIRLLAKMPTLAAMCYKYSIGQPFMFPLNKLSYAGNFLYMMFATPCEPYEVNPVLEKAMDRIFILHADHEQNASTSTVRTAASSGANPFACIAAGIASLWGPAHGGANEACINMLEEIGSVDRIPEYIARAKDKNDPFRLMGFGHRVYKNYDPRAKVMRQTCHEVLKELNIQTPLFDVAMELERIALNDPYFIDHKLYPNVDFYSGIILKAIGIPTSMFTVIFALARTVGWIAHWKEMFKPGNMKIVRPRQLYKGHTERKFDAIEK

SEQ ID NO: 11458 - protein, 150 aa, Chlamydophila caviae GPIC
MQLLSPAFDYGKPIPRKYTCQGVNISPPLIFKDIPAEAKSIALIVEDPDVPQNLRADGLWIHWLVYNLSPTITELVEGANIFAVQGLNTSGKACYEGPCPPDRQHRYFFYCYALDTILPSEENVTKDQLLEVMESHVIDNAELMGTYEKS

SEQ ID NO: 11459 - protein, 373 aa, Methanocaldococcus jannaschii DSM 2661
MMVRVMRYKKVPVKKIVNKIIDECDVILLVLDARDPEMTRNRELEKKIKAKGKKLIYVLNKADLVPKDILEKWKEVFGENTVFVSAKRRLGTKILREMIKQSLKEMGKKEGKVGIVGYPNVGKSSIINALTGKRKALTGSVAGLTKGEQWVRLTKNIKLMDTPGVLEMRDEDDLVISGALRLEKVENPIPPALKILSRINNFDNSIIKEYFGVDYEEVDEELLKKIGNKRSYLTKGGEVDLVRTAKTIIKEYQDGKLNYYKVDLKKYGQDRERDISFITKYLKDFPFIEDAKMIVTHLKDFDGLYKKIKKPVLGSEEIDGNIVVVSFGEKTKDACRKKVENLCRERNIEVLSKFGDKIGANNIYVAVGKRVKE

SEQ ID NO: 11460 - protein, 400 aa, Pyrococcus furiosus DSM 3638
MSIRLPQEGKVIEVVNGSLKIPNEPIVAYIEGDGIGREVIPAAIKVVDKAVETAYKGKRRIVWWKLLAGKEALQKVGKLLPEETVKGIAEVKVALKGPMETPIGTGHRSINVALRKMFDLYANIRPIKYYGVPTVYPYADKVDLIIFRENTEDVYAGIEWEAYSREAQKLREFLKNEFGIEIREDSGITLKPISKFATQRIVRKAIKWAIEKGRKRVTIMHKGNVMKFTEGAFRNWAFEVAEKEFSEYVSIGKPEEGKILVDDKIADNMLQQIILRPWEYDIIVTPNLNGDYLSDAAAALVGGVGMAAGINVGDYIAIAEPVHGTAPDIAGKGIANPSAAILSAALLLEYLGWVEAAELIRASLRKTIEKGKVTPDLARGEKALSTEEFIQEVIKEIEGE

SEQ ID NO: 11461 - protein, 423 aa, Lolium perenne
AVVCGRRYDVRIRVRSGGHDYEGLSYRSLQPENFAVVDLNQMRAVLVDGKARTAWVDSGAQLGELYYAISKYSRTLAFPAGVCPTIGVGGNLAGGGFGMLLRKYGIAAENVIDVKLVDANGKLHDKKSMGDDHFWAVRGGGGESFGIVVSWQVKLLPVPPTVTIFKIPKSVSEGAVDIINKWQLVAPQLPADLMIRIIAMGPKATFEAMYLGTCKTLTPMMQSKFPELGMNASHCNEMSWIESIPFVHLGHRDSLEGDLLNRNNTFKPFAEYKSDYVYEPFPKSVWEQIFGTWLVKPGAGIMIFDPYGATISATPEAATPFPHRKGVLFNIQYVNYWFAPGAGAAPLSWSKEIYNYMEPYVSKNPRQAYANYRDIDLGRNEVVNGVSTYSSGKVWGQKYFKGNFERLAITKGKVDPTDYFRNE

SEQ ID NO: 11462 - protein, 165 aa, Aegilops tauschii
VMASSATTVAPFQGLKSTAGLPVSRRSSGSLGSVSNGGRIRCMQVWPIEGIKKFETLSYLPPLSTEALLKQVDYLIRSKWVPCLEFSKVGIVFREHNSSPGYYDGRYWTMWKLPMFGCTDATQVLNEVEEVKKEYPDAYVRVIGFDNLRQVQCVSFIAFRPPGCE

SEQ ID NO: 11463 - protein, 218 aa, Triticum aestivum
  misc_feature (44)..(44): Xaa can be any naturally occurring amino acid
MEAETAAKRARENEGAAAADGAGEQAGISAVIPGWFSEISPMWXYQEMITHLPLCSIKDPKKVLVIGGGDGGVLREVSRHSSVEQIDICEIDKMVVDVSKQFFPHLALGFEDPRVSLHIGDGVAFLKNAPEGTYDAVIVDSSDPVGPAQELFEKPFFESVSRALRPGGVVCTQAESIWLHMHIIEDIVTKNQKPKSSRPQTPKEKKPRRRRRPSPPKP

SEQ ID NO: 11464 - protein, 165 aa, Triticum urartu
VMASSATTVAPFQGLKSTAGLPVSRRSSGSLGSVSNGGRIRCMQVWPIEGIKKFETLSYLPPLSTEALLKQVDYLIRSKWVPCLEFSKVGFVFREHYSSPGYYDGRYWTMWKLPMFGCTDATQVLNEVEEVKKEYPDAYVRVIGFDNLRQVQCVSFIAFRPPGCE

SEQ ID NO: 11465 - protein, 454 aa, Desulfitobacterium hafniense DCB-2
MNVFNLVIKNGKVVTADKIIEASLGINNGKIAAIIEAGTEIQAEKVIDAKGNYVFPGAIDTHAHLNDPGYLWREDYAHGTAAAGVGGFTTIIDMPLQNEPAMTDGQILDKKLEVVSPNAYVDFCFWGGLVDYNLNQLKELDEKGCVAFKSFIGPVSPDYVSLTIGQAKEAMEICKEFDGRAGFHCEDYSLIKWEEARAKRKDTNDWQDFLDSRPVIAELIATQNIIDLAKEVGAKVHICHVSHPRVAEIIRQAQNEGVDVTAETCGHYLTFTDQDVVKNGSLFKCAPPLRDAAAVERMWEYVNNGTLSAIASDHSPCELSEKSEEKHGVFGAWGGISGIQNVMQVVFSEGVVKRGYCPTLLARSLSEGPAKAFGIFGKKGAIQVGFDADLVILDPEKEWEITPESLYYVNPISAFVGLKGKGLPVCTLVRGEVVAQDGQLVGQKGHGEYVRKIK

SEQ ID NO: 11466 - protein, 165 aa, Triticum timopheevii subsp. armeniacum
VMASSATTVAPFQGLKSTAGLPVSRRSSGSLGSVSNGGRIRCMQVWPIEGIKKFETLSYLPPLSTEALLKQVDYLIRSKWVPCLEFSKVGFVFREHNSSPGYYDGRYWTMWKLPMFGCTDATQVLNEVEEVKKEYPDAYVRVIGFDNLRQVQCVSFIAFRPPGCE

SEQ ID NO: 11467 - protein, 165 aa, Triticum turgidum subsp. dicoccoides
VMASSATTVAPFQGLKSTAGLPVGRRSSGSLSSVSNGGRIRCMQVWPIEGIKKFETLSYLPPLSTEALLKQVDYLIRSKWVPCLEFSKVGFVFREHNSSPGYYDGRYWTMWKLPMFGCTDATQVLNEVEEVKKEYPDAYVRVIGFDNLRQVQCVSFIAYRPPGCE

SEQ ID NO: 11468 - protein, 333 aa, Zea mays
  misc_feature (225)..(225): Xaa can be any naturally occurring amino acid
MIRAVSSNASDNVYCTLLAHSALHGAMAGYTGFTVAPVNGRHAYIPFYRITLLDLKDPFPAAANSGAKASSASKWATKKKLVGGDAGYVLEDVPHLTDYMPQLPSPILLVCHVGFLTTYPNPLQDNPAYSVVKQYFVNPDDTVTQKIVVHKTSARGTHFRRAGPRQRVYFQSDEVNAAIVTCGGLCPGLNTVIRELVCGLYDMYGVSSVVGIEGGYKGFYSKNTXVALTPKSVNDIHKRGGTVLGTSRGGHDTAKIVDCLQDRGINQEVRRRGLKCSVVGVPKTIDNDIAVIDKSFGFDTAVEEAQRAINAAHVEAESAENGIGVVKLMGPHQ

SEQ ID NO: 11469 - protein, 165 aa, Triticum aestivum
VMASSATTVAPFQGLKSTAGLPVGRRSSGSLSSVSNGGRIRCMQVWPIEGIKKFETLSYLPPLSTEALLKQVDYLIRSKWVPCLEFSKVGFVFREHNSSPGYYDGRYWTMWKLPMFGCTDATQVLIEVEEVKKEYPDAYVRVIGFDNLRQVQCVSFIAFRPPGCE

SEQ ID NO: 11470 - protein, 428 aa, Zea mays
MGRGLGAAPVSPRLASLGAAALALLVAAALPSPAAGVNATAVLSAFPNFADFARLLASTPVASELAGRSSLTLLAVPNANLPQSPSAFVAGAAAGADIADVLRYHVLLEYLSPSDLARLPPSGKLVTTLFQTTGRAPSDFGAVNLTVGPNSTVVVRSPAPSPGSSATVLGAVTAVPYNLSVLAVGGLIVPSGFDLAASESRPPPPVNITRVLTDARGFYVAASMLQASGVASEFEADERGAGITVFVPTDDAFAGLPATDRLQSLPAERKAVVLRFHVLHSYYPLGSLESIVNPVQPTLATEHTEAGHFTLNITRVNGSIAIDTGIVQASITRTVFDQNPVAVFAVSKVLLPKEMFSRGDSGSTAMVPPSVAMAPGDAGTEQTPQTRLSSPPDLHGEDSESSAALATAKGTSWWCVGLMYLHLLLSLV

SEQ ID NO: 11471 - protein, 494 aa, Salmonella typhimurium LT2
MSDVTLLAEVTTFLRQRHGQFIAGERQAGNGTNFSVTNPATGKIIADVVSATPAQAEEAMQSARRAFDVWRKMPTLQRGALLLKLADTLAAHREELAQLESVCSGKTIMLSRGLELDQSVAFLRYFAGWAGKITGETLNVSLPSMGEERYTAFTQRQPIGVVVGIVPWNFSIMIAIWKLAAALVCGCTIVIKPSEYTPLTLLRVAELAKEAGFPDGVINVVNGAGGEIAQQLIAHPDCAKVSFTGSVATGEKVRRSATSSGKRVTLELGGKNAALFLNDLTAQAMVNGILEAGYLNQGQICAAAERFYLPQEKLDTVMTLLRQRLSEIVPGSPLDEKTVMGPLANQVQLEKVLRLIQRAREEGDTIVYGGETLPGEGYFLQPTAVKVRSKNSTLMHEETFGPVCSFIGYQNEKEALSHINDSPFGLAASVWSENISKALRYAEDIDAGMVWVNMHTFLDPAVPFGGMKGSGIGREFGSAFIDDYTELKSVMVRY

SEQ ID NO: 11472 - protein, 576 aa, Brassica napus
MAASFSVPSMIMEEEGRFEAEVAEVQTWWSSERFKLTRRPYTARDVVALRGHLKQGYASNEMAKKLWRTLKSHQVNGTASRTFGALDPVQVTMMAKHLDTIYVSGWQCSSTHTSTNEPGPDLADYPYDTVPNKVEHLFFAQQYHDRKQREARMSMSREERAKTPFVDYLKPIIADGGTGFGGTTATVKLCKLFVERGAAGVHIEDQSSVTKKCGHMAGKVLVAVSEHINRLVAARLQFDVMGTETVLVARTDAVAPTLIQSNIDSRDHQFILGVTNPNLRGKSLSSLLAEGMAVGNNGPALQAIEDQWLSSARLMTFSDAVVEALKRMNLSENEKSRRVTEWLIHARYENCLSNEQGRELAAKLGVTDLFWDWDLPRTREGFYRFQGSVTAAVVRGWAFAQIADLIWMETASPDLNECTQFAEGVKSKTPEVMLAYNLSPSFNWDASGMTDQQMMEFIPRIARLGYCWQFITLAGFHADALVVDTFAKDYARRGMLAYVERIQREERSNGVDTLAHQKWSGANYYDRYLKTVQGGISSTAAMGKGVTEEQFKETWTRPGAAGMGEGTSLVVAKSRM

SEQ ID NO: 11473 - protein, 366 aa, Streptomyces avermitilis MA-4680
MSDFVPGLEGVIAFETEIAEPDKEGGALRYRGVDIEDLVGHVSFGNVWGLLVDGAFNPGLPPAEPFPIPVHSGDIRVDVQSALAMLAPVWGLKPLLDIDAEQARHDLARAAVMALSYVAQSARGQGLPMVPQSEIDKAHSVVERFMIRWRGEPDPKHVAAVDAYWTSAAEHGMNASTFTARVIASTGADVAAALSGAVGAMSGPLHGGAPSRVLGMIEEIERTGDAEAYVKKALDKGERLMGFGHRVYRAEDPRARVLRRTARELGAPRFEIAEALEKAALEELHNRRPDRVLATNVEFWAAIMLDFAEVPAHMFTSMFTCARTAGWSAHILEQKRTGRLVRPSARYVGPGSRGPQEIEGYEDIAR

SEQ ID NO: 11474 - protein, 358 aa, Shigella flexneri 2a str. 301
MKALARFGKAFGGYKMIHVPQPICGPEDVVTEIKAAAICGADMKHYNVDSGSDEFNSIRGHEFAGCIAQVGEKVKDWKVGQRVVSDNSGHVCGVCPACEQGDFLCCTEKVNLGLDNNTWGGGFSKYCLVPGEILKIHRHALWEIPDGVDYEDAAVLDPICNAYKSIAQQSKFLPGQDVVVIGTGPLGLFSVQMARIMGAVNIVVVGLQEDVAVRFPVAKELGATAVVNGSTEDVVARCQQICGKDNLGLVIECSGANIALKQAIEMLRPNGEVVRVGMGFKPLDFSINDITAWNKSIIGHMAYDSTSWRNAIRLLASGAIKVKPMITHRIGLSQWREGFDAMVDKTAIKVIMTYDFDE

SEQ ID NO: 11475 - protein, 341 aa, Shewanella oneidensis MR-1
MKALSKLKAEKGIWLVDAPKPEMGHNDLLIKIKKTAICGTDMHIYNWDEWSQKTIPVPMVVGHEYVGEVVDIGQEVRGFNIGDRVSGEGHITCGHCRNCRAGRTHLCRNTSGVGVNREGSFAEYLVIPAFNAFKIPDDISDDLASIFDPFGNAVHTALSFDLVGEDVLITGAGPIGIMAAAVCRHVGARHVVITDVNEYRLELARKMGATRAVNVAQENLKDVMKELGMTEGFDVGLEMSGVPSAFRAMLDTMNHGGKIAMLGIPGGEMAIDWSKVIFKGLVIKGIYGREMFETWYKMASLIQSGLDISPIITHHYKIDDFQKGFDAMGSGQSGKVILSWD

SEQ ID NO: 11476 - protein, 296 aa, Saccharomyces cerevisiae
MITTPLVHVASVEKGRSYEDFQKVYNAIALKLREDDEYDNYIGYGPVLVLLAWHISGTWDKHDNTGGSYGGTYRFKKEFNDPSNAGLQNGFKFLEPIHKEFPWISSGDLFSLGGVTAVQEMQGPKIPWRCGRVDTPEDTTPDNGRLPDADKDAGYVRTFFQRLNMNDREVVALMGAHALGKTHLKNSGYEGPWGAANNVFTNEFYLNLLNEDWKLEKNDANNEQWDSKSGYMMLPTDYSLIQDPKYLSIVKEYANDQDKFFKDFSKAFEKLLENGITFPKDAPSPFIFKTLEEQGL

SEQ ID NO: 11477 - protein, 364 aa, Neurospora crassa
MSTEAKKTMKAVVFEGPKKVSVQERPIPEVQDPRDIIVKVQMTALCGSELHTYRGREASTPGFIMGHEFTGVAHAVGSSVKTIKVGDKVVAPFTVSCGTCFYCLHGFSSRCASSLLFGSPGLDGGQAEYVRIPLADGTAVVAPPEIEDERALVLMADIFPTGYFGAKNAFKLMHDLNPEEATVVVVGCGPVGLCAVVSALEYKPKHLFAVDCVESRLALAKELGAEPLNFAEVEKGGVGLEGMVKRIKEVTEGRGADAVVEVVGSRPALKTAYELLRPFGVISSIGVQGHYDLPWSGEDGYNKNLRVQMGRCPVRSIFPEALEVMGRNQHKFGFMYDKIMPLAEAVEGYDLFDNMKVQKVIFTP

SEQ ID NO: 11478 - protein, 347 aa, Chloroflexus aurantiacus
MRAARLHEYDEHLNVQLQLEDVPLPKITKPGDVIVRIGAAGLCRTDLHIIEGVWKDIQDPQRTLLPYILGHENAGWVEEVGPGVTSVKVGDPVICHPLRSCGVCLGCRRGEDMYCEHGSFPGLNCDGGFAEYMLTNERALIKLNPNVAPVDVAPLADAGITAYRVAKKAARKLNPGQYCVILGVGGLGHIALQSVRELCGARIIAIDRSEAARQLARNLGAHYVLDGSDTIVQEVKELTHGGAHVVIDFVGELGAEQVSWQMLRQGGTHFVVGYGGAVHVPTVHMIITEIAIEGSLVGNYVELVELMELNAEGRVKLHGQQYRLDQINQAIDDFKNRRIAGRAVIVP

SEQ ID NO: 11479 - protein, 218 aa, Oryza sativa
MEVEEAAYRTVWSEPPKRPAGRTKFRETRHPVYRGVRRRGGRPGAAGRWVCEVRVPGARGSRLWLGTFATAEAAARGHDAAALALRGRAACLNFADFAWRMPPVPASAALAGARGVRDPVAVAVEAFQRQSAAPSSPAETFANDGDEEEANKEVLPVAAAEVFDAGAFELDDGFRFGGMDAGSYYASLAQGLLVEPPAAGAWWEDGELADSDMPLWSY

SEQ ID NO: 11480 - protein, 150 aa, Triticum aestivum
  misc_feature (69)..(69): Xaa can be any naturally occurring amino acid
  misc_feature (86)..(86): Xaa can be any naturally occurring amino acid
  misc_feature (88)..(88): Xaa can be any naturally occurring amino acid
  misc_feature (94)..(94): Xaa can be any naturally occurring amino acid
  misc_feature (112)..(112): Xaa can be any naturally occurring amino acid
  misc_feature (118)..(118): Xaa can be any naturally occurring amino acid
  misc_feature (126)..(126): Xaa can be any naturally occurring amino acid
MAPTVMASSATSVAPFQGLKSTAGLPVSRRSNGASLGSVSNGGRIRCMQVWPIEGIKKFETLSYLPPLXSTEALLKQVDYLIRSKXGXPCLEVXQRVGFIFREHNASPGVLXDGRYWXIWELPMFXVPTQGDSGGKRKKRSPGRSSAINP

SEQ ID NO: 11481 - protein, 353 aa, Rhodobacter sphaeroides 2.4.1
MVRPRLNWAAEPWSDSEELECAMVIPETETCATFAFRAPSGAWFDYQPGQFLTLDLPVPGGRVQRTYTISSSPSRPLSLSVTVKAQPGSIGGRWMLDKLKPGMRIKAYGPAGQFTSLRHRSPKYLFISAGSGITPMMSMTTWAWDSGEMPDIVFVHAARSPAEIIFRRRLEQFARRVPGLQLRFTVKEEDPFSVWTGYRGRLSQIMLGLMAPDYLEREVFCCGPEPFMQAVREMLVSLGYDMDRYHEESFAAPALEELPVDIPEPAAVSELCFAASGVRVACDGTETVLAVARRAGLNIPSGCNFGLCGTCKVQKIEGEVAMVHNGGISDEEIAAGTILACCARPQGRVTLDL

SEQ ID NO: 11482 - protein, 467 aa, Methanococcoides burtonii DSM 6242
MTSRLNRSLFVFRRDMRVDDNSALLAALDMSDVVIPCFILDPRLCDPKGKAFNSNALQFLLESLYDLKGQLEKVNGRLYLFSGLPEGVIGQLLENLEIDAVFVNHDYTPFSIKRDMQIASICTDKGVDMLQFHDCLLHEPGSIRTKKGTPYKVFTQFFREASKRDVAVPSMFSGGSFFTGDCGVDEVDEGSFLKRSLPERNEQIFVHGGRANGLSVLQSLSQFVNYDTERDLPSVKGTTGLSAHNKLGTISIREFYYSVIDELGRGHTLINELYWRDFFTQISFEFPDVFKHAFKKKFDHLSWDNDRIFFDAWCLGKTGFPIVDAGMRELNTTGYMHNRVRMIVASFLVKDLHIDWKRGERYFASKLVDYDPCVNNGNWQWAASTGADSQPYFRIFNPWLQQKKFDKDCKYIKKWIPELEDIEPQRIHKLEKGDMDIPGYPAPIVDHSKEREVALFMFKAASQIMDV

SEQ ID NO: 11483 - protein, 122 aa, Rickettsia rickettsii
MIQMQSILEVADNSGAKKVMCIKVLGGSHHMVAKLGDVIVVSVKDAIPGGKVKKGDVYKGLIVRTKTGVVRPDGSTIKFDQNALVLLNKQDEPIGTRVFGPVTRELRAKKYVRIMSLAEEVL

SEQ ID NO: 11484 - protein, 483 aa, Prunus avium
MLAQKQAEEAIVSNFSEAHDHEGKEDHHQDKEEENTSLFNVKNFLWHGGSVWDAWFSCASNQVAQVLLTLPYSFSQLGLLSGILLQIFYGIVGSWTAYLISVLYIEYRSRKEKENVNFKNHVIQWFEVLDGLLGPYWKAVGLAFNCTFLLFGSVIQLIACASNIYYINDNLDKRTWTYIFGACCATTVFIPSFHNYRIWSFLGLGMTTYTAWYLTIAAVVHGQKEGVTHTAPTKLVLYFTGATNILYTFGGHAVTVEIMHAMWKPQKFKYIYLFATVYVFTLTIPSATSVYWAFGDELLNHANAFSLLPKNAWRDAAVILMLIHQFITFGFACTPLYFVWEKVIGMHDTKSICLRALARLPVVIPIWFLAIIFPFFGPINSAVGALLVSFTVYIIPSLAHMLTYRKASARQNAAEKPPFFLPSWTAMYVINSFIVVWVLVIGFGFGGWASMTNFVRQVDNFGLFAKCYQCNSPKLPAAAAPHH

SEQ ID NO: 11485 - protein, 260 aa, Triticum aestivum
SARGADIWSCGVILFVLLAGYLPFHDKNLMDMYKKIGKAEFKCPCWFSTDARRLLLRILDPNPSTRISMEKIMENPWFRKGLDAKLLRYNLQSKNAPQVDKNADSDSLSINITAESKQQEEKKPTNMNAFDIISLSTGLDLSGLFEESDNKREYKFTSTNTSSTIVSKIEDVAKNLRLKLTKKDGGLLKMEASKPGRKGVMGIDAEIFEVSPNFHLVEIKKTNGDTLEYQKVLNREMRPALKDIVWAWQGEQSKQQQTMI

SEQ ID NO: 11486 - protein, 165 aa, Triticum aestivum
VMASSATTVAPFQGLKSTAGLPVSRRSSASLGSVSNGGRIRCMQVWPIEGIKKFETLSYLPPLSTEALLKQVDYLIRSKWVPCLEFSKVGFVFREHNSSPGYYDGRYWTMWKLPMFGCTDATQVLNEVEEVKKEYPDAYVRVIGFDNLRQVQCVSFIAFRPPGCE

SEQ ID NO: 11487 - protein, 273 aa, Oryza sativa (japonica cultivar-group)
MAAAVRSVWADNFAAESAILRAVAPCAVYAAINVQYPGCVVSAAGGAGDHRCYYDLTAEERYQVVRANADELKPLQLGLAVRTADGGRFAWEFNLNEFDLAADGDMCEPGSVDYLRHRGMDFNALPWSGVGAASLGRLLWSSGLLAARPSWATFAGAYHVAYFARILMLAVAVAGTGGGGAARRLPADVGGFEEMVRSLLGHHVYDVRLLAGELRGPLADVARQLGAAVPADAAAAGLAGAGALMALQAFEALREQCRGVMPHRGLLCGIQAS

SEQ ID NO: 11488 - protein, 391 aa, Thermosynechococcus elongatus BP-1
MNLLEQLRQMTVVVADTGDILAIQKFTPRDATTNPSLITAAAQMKEYQSIVDETLRQAKADLGSGATSREIVSLAVDRLAVAFGLKILQIIPGRVSTEVDARLSYDTAATVQKARELISQYEAAGVGRDRVLIKIAATWEGIRAAEILEKEGIHCNLTLLFGFHQAVACAEAGVTLISPFVGRILDWYKKKTGRAEYPGPEDPGVISVTKIYNYYKKFGYPTEVMGASFRNIGEIIELAGCDLLTISPALLQELQNTTGELKRKLDPAIAATLDIEKVAMDEATFRKMHAADEMASEKLEEGIKGFTKALETLEDLLRRHLARIEGEATLTHAAEELFHVYDLDGDGIITREEWLGTDAVFDALDANHDGKVTPEDMGAGLGVVLHLAQAK

SEQ ID NO: 11489 - protein, 165 aa, Secale cereale
VMASSATSVAPFQGLKSTAGLPVSRRSSGSLGSVSNGGRIRCMQVWPIEGIKKFETLSYLPPLSTEALLKQVDYLIRSKWVPCLEFSKVGFVFREHNSSPGYYDGRYWTMWKLPMFGCTDATQVLNEVEEVKKEYPDAYVRVIGFDNLRQVQCVSFIAFRPPGCV

SEQ ID NO: 11490 - protein, 400 aa, Exiguobacterium sp. 255-15
MNQTEKIITQTEKFGAHNYHPLPIVISEAEGVFVKDPEGREYMDMLSAYSAVNQGHRHPKIIEALKRQADKITLTSRAFHNDQLGFFYEKVAQLTGKDMVLPMNTGAEAVETAVKAARRWAYEVKQIPGDAEIIVCEGNFHGRTMTAVSMSTEAEYQRGFGPLLPGIKTIPYGDLEALKGAITENTAAFIVEPIQGEAGILIPYEGFLKDAQDVCKEQNVLLVSDEIQSGLGRSGKWFASDWDNVTPDMYILGKALGGGVFPISCVAANHDILSVFNPGSHGSTFGGNPLACAVSVASLEVLEEEKLPERSLELGTYFMNRLKEIDNPMIKEVRGRGLFIGVELTEAARPYCEALKEKGLLCKETHETVIRFAPPLVITKEELDWAFERIEQVLGVSVAQ

SEQ ID NO: 11491 - protein, 164 aa, Bromus catharticus
VMASSATSVAPFQGLKSTAGLPVSRRSTGLGSVSSGGRIRCMQVWPIEGIKKFETLSYLPPLSTEALLKQIDYLIRSKWVPCLEFSKVGFVFREHNASPGYYDGRYWTMWKLPMFGCTDASQVIKELEEVKKEYPDAYVRIIGFDNLRQVQCVSFIAFKPPGCE

SEQ ID NO: 11492 - protein, 165 aa, Brassica napus
MAQDDQSAARSTGTVNWFSDAKGYGFIAPDDGGDELFVHQSSIVSDGFRTLTVDEPVEYAIAVGNDGKTKAVDVTAPGGGSLNKKEMSSRGNGGSCFSCGEVGHMAKDCAGGKRYGGGGRRSGGEGSCYVCGNVGHFARDCRQNAGGNSGGGGGGECYNCGVVGH

SEQ ID NO: 11493 - protein, 225 aa, Commelina communis
MGRGKIEIKKIENPTNRQVTYSKRRAGIMKKAKELTVLCDAQVSIIMFSSTKKFSEFCSPGTNTKQIFDRYQQACQVDLWSAQYERMQNHLKNLKEINDGLRREIRQRMGEDLDGMDIEELRGLEQNLHDSLKTVRERKYHVLQTQTETYKKKVKHSSEAYNNFVRALQMKEDDPVYGYVDDEASHFEGALALANGSSHMYAFRLQPNQPNLHGMEYAPHDLRLA

SEQ ID NO: 11494 - protein, 199 aa, Oceanobacillus iheyensis HTE831
MNKSTNIVWQKTSVKKADRQHLNNHKSAVLWFTGLSGSGKSTLSSALEKELFSLETHTYHLDGDNVRHGLNKNLGFSPEDREENIRRIGEVSKLMVDAGLITLTAFISPYQEDRDHVRATLAQDEFIEIYVKCSLDMCEARDPKGLYKKARLGEINNFTGIDAPYEEPLHPEIVIDTENQSIEESVQTIIHYLKDKQYI

SEQ ID NO: 11495 - protein, 123 aa, Oryza sativa (japonica cultivar-group)
MIQPQTLLNVADNSGARKLMCIRVIGAASNQRYARIGDVIVAVIKDAVPQMPLERSEVIRAVIVRTCKEFKCEDGIIIRYDDNAAVIIDQKGNPKGTRVFGAIAEELRELNFTKIVSLAPEVL

SEQ ID NO: 11496 - protein, 159 aa, Prochlorococcus marinus subsp. marinus str. CCMP1375
MLINVKETVVETADGEKKNLGDYLGNVLLIVNVASLCGNTPQYKGLEKLFEKYKKNGFCVLAFPCNDFAGQEPGTIEEIKEFCSVKYGTTFEIFNKVHAKGLTTEPYTTLNKVEPKGDVSWNFEKFLVGKDGNVIARFEPSVEPSSEELITAIEVALSS

SEQ ID NO: 11497 - protein, 471 aa, Streptomyces coelicolor A3(2)
MATAPSVSYSMTVRLEVPAGGTAVSQLTTAVESAGGSVTGLDVTASGHDKLRIDVTIAAGSTAHADEIVEQLRGIEGVSLGKVSDRTFLMHLGGKIEMQSKHPIRNRDDLSMVYTPGVARVCMAIAENPEDARRLTIKRNSVAVVTDGSAVLGLGNIGPKAALPVMEGKAALFKRFAGIDAWPICLDTQDTDAIVEIVKAIAPGFAGINLEDISAPRCFEIEARLREALDIPVFHDDQHGTAIVVLAALTNALRVVGKGIENVRVVMSGAGAAGTAILKLLLAAGVKNAVVADIHGVVHTGRADLVDAAPESALRWIADNTNPEGLTGTLKEAVHGADVFIGVSAPNVLDGEDVAAMADGAIVFALANPDPEVDPAIARETAAVVATGRSDFPNQINNVLVFPGVFRGLLDAQSRTVNTEMMLAAAHALANVVTEDEINPNYIIPSVFNDKVAGAVAGAVRDAAKAAGVVA

SEQ ID NO: 11498 - protein, 166 aa, Schizosaccharomyces pombe
MSDQDALDTQEKELLEMKERVAEMEAEAAKLRAMQEQLDNETEALRNDKESIDAQSVYVGNVDYSVTPEELQSHFASCGSVNRVTILCDKFTGHPKGFAYIEFSEPSLVPNALLLNGSMLHERPLKVTPKRTNVPGMSRGRGRGRGRGRGRGRGGYRGRARGFAPY

SEQ ID NO: 11499 - protein, 160 aa, Solanum tuberosum
MSDEEHHFESKADAGASKTYPQQAGTIRKNGYIVIKGRPCKVVEVSTSKTGKHGHAKCHFVAIDIFNGKKLEDIVPSSHNCDVPHVNRTDYQLIDISEDGFVSLLTESGNTKDDLRLPTDESLLKQVKDGFQEGKDLVVSVMSAMGEEQINAIKDIGTKN

SEQ ID NO: 11500 - protein, 1413 aa, Aspergillus nidulans FGSC A4
MADLKPPFTEEAARAKVKIAQNLWNAQDPVRVSQAYTPGCIWRNRTSFFSGTEAIVDFLTAKWKRERNYRLRKELFSFTDNRIAVQFWYEFQDANDSMRWKRCYGLEDWTFDRESGKMCKRMMSGNDILLGPDGNGEGRCDYRLLTQRWDHPTYHPYNRNRRLQQLDLNHFCRARISLAMEETSPFPDSKTMRSPLTDASNRINNCHTPTTERRLMREEHALTSPVPMSIVDSPLSPRNNAENNGPPPVGDSRACSKRNSAVSAASIVSAKGKRKTHVGPWQLGRTLGSGATGRVRLAKHAVTGQTAAVKIVSKKCAAISQSDSIAAMDRNAGTFIGAGGRQMPSGIEREVVIMKLIEHPNVISLYDVWENRGELYLVLEYVEGGELFDYVSNHGPLPEEEAVRLFRQIIAGLGYCHRFNICHRDLKPENILLDGEHNIKLADFGMAALQPAGHWLNTSCGSPHYAAPEIIYGRKYRGDKADLWSCGIILFALLTGFLPFDGEDLHATLQLVRKGDYMIPPHVSAEAADLIQRILQKKPDDRISMKDIWKHPLLKKYEKFHQAICNHYLGPPPPLSPQDCGPPVVRQDIDVDLLRNLQTLWHDVKPERLIEKLISLEPTQERLFYHALVKFRNEQLENYEGQPLRYSTSDYHHISRGQARLSKHLRSRSQNGSQRRSRAPSVKETGKRRPSTRELKPSASVETYDPYRSPFNRVPDKSPQYAHVTIHREAPETSPKPAEVEVDSSNPFLDDEQEIECQQSPPFTLVRKRKQNFNSVKSFQSKTSLISSRRALNSASTPRSVSYKRNVTFHHNRNRSQSSASAKAKRAHCNRQPSEASLISGFDDDPFSDSRSSSLLPAQPAVVRGAGIAVKNSVQRRVQHSDFVWRDEARKVSHELSQICEEAFNGSSLSTGCTDTTCVSPETPATSVSLASPGVSNHQMDSSSSTVCLAATPPADSPKTSHVRRELEETRRRLIEHSMKDGSKEIPQCLAPVIDHLDRLIEQEKTRRPGKVSTKEDYSSMSDLFCGSPVEPTQLSVLSEELNTGRRSDDTPSSKKDRQVSGSTAASSQISRGKRSIRMVPHSSYQSISNTEPRAVHRPAAALIDRPENDRGNALASRVGSNHRHNRTPCELDPIDEHPASPRRSAVRSTDHKKWSWFRKSQNIEEDFVKAPTVVKPLHPSSATVIVHEVHPARNTAENQPKLGKPPSDSQKVSFWSFIKRKKGKNADPESTATNPVLESRRDDERQRAHPGPKLSENKTATKPRRSIRSSGISNNWFARVFQFKPATRVVALNASKIKGRKEIYKMLRDWKQYGMEDIYLDKPNSIIYGRVGESNFLHLRPVDFSADFYTVIEDGRQANLSVVRFRQERGAASSFNRVVDTLCMVMKQRGLLVEDPARAKRMAQVLDAFPNA

SEQ ID NO: 11501 - protein, 304 aa, Zea mays
  misc_feature (116)..(116): Xaa can be any naturally occurring amino acid
  misc_feature (143)..(143): Xaa can be any naturally occurring amino acid
  misc_feature (168)..(168): Xaa can be any naturally occurring amino acid
MAGMSLQHPWAFAFGLLGNVISFMTFLAPIPTFYRIYKSKSTEGFQSVPYVVALFSAMLWIFYALIKSNETFLITINAAGCVIETIYVVMYFVYAPKKAKLFTAKIMVLLNGGVFXVILLLTLLLFKGSKRVVLLGWICVGFXPVSVFVAPLSIMRRVIQTKSVEYMXPFSLSLSFTLSAVVWFLYGLLIKDKYVALPNILGFTFGVVQMVLYVLYMNKTPVAATAEGKDAGKLSSAADEHVLVNIAKLSPALPERSSGVHPVTQMAGVPVRSCAAEATAPAMLPNRDVVDVFVTRHSPAVHVA

SEQ ID NO: 11502 - protein, 204 aa, Yarrowia lipolytica
MPQPTDLRRKLVIVGDGACGKTCLLIVFAKGTFPEVYVPTVFENYVADVEIDGRRVELALWDTAGQEDYDRLRPLSYPDANVIIICFAIDSPDSLDNVQEKWISEVLHFCQGVPILLVGCKVDLRNDPKTIEELRRTSQRPVTTEEGNAVAQKIGAGKYLECSARTHDGVREVFEHATRAALTAHGQKGSKSSSREGKKKCLIL

SEQ ID NO: 11503 - protein, 222 aa, Triticum aestivum
  misc_feature (93)..(93): Xaa can be any naturally occurring amino acid
GGIPFNKAYGMTAFEYHGTDSRFNRVFNEGMKNHSVIITKKLLDFYTGFEGVSTLVDVGGGVGATLHAITSRHPHISGVNFDLPHVISEAPAXFPGVRHVGPGTCSPPVPAGDAILMKWILHDWSDAHCATLLKNCYDALPENGKVIVVECVLPVNTEATPKAQGVFHVDMIMLAHNPGGKERYEREFRELAKGAGFSGFKATYIYANAWAIDSSSEPPSPR

SEQ ID NO: 11504 - protein, 347 aa, Bacillus subtilis subsp. subtilis str. 168
MQSGKMKALMKKDGAFGAVLTEVPIPEIDKHEVLIKVKAASICGTDVHIYNWDQWARQRIKTPYVFGHEFSGIVEGVGENVSSVKVGEYVSAETHIVCGECVPCLTGKSHVCTNTAIIGVDTAGCFAEYVKVPADNIWRNPADMDPSIASIQEPLGNAVHTVLESQPAGGTTAVIGCGPIGLMAVAVAKAAGASQVIAIDKNEYRLRLAKQMGATCTVSIEKEDPLKIVSALTSGEGADLVCEMSGHPSAIAQGLAMAANGGRFHILSLPEHPVTIDLTNKVVFKGLTIQGITGRKMFSTWRQVSQLISSNMIDLAPVITHQFPLEEFEKGFELMRSGQCGKVILIP

SEQ ID NO: 11505 - protein, 407 aa, Aethionema grandiflora
YQGVYPVKGNQDRFVVEDIVKFGSPFRFGLEAGSKPEILLAMSCLCKGNPDAFLVCNGFKDAEYISLALLGRKLALNTVIVLEQEEELDLVIDLSQKMNVRPVIGLRAKLRTKHSGHFGSTSGEKGKFGLTTTQIVRVVRKLRQAGMLDCLQLLHFHIGSQIPSTALLSDGVAEAAQLYCELVRLGAHMKVIDIGGGLGIDYDGSKSGESDLSVAYTLEEYADAVVASVRFVCDRKSVKHPVICSESGRAIVSHHSVLIFEAVSAAKPMAHHANPEDIQFLLEGNEEARADYEDLYAAVMRGDHESCLLYVDQLKQRCVEGFKEGVLSIEQLASVDGLCEWVLKAIGASDPVRTYHVNLSVFTSIPDFWGIEQLFPIVPIHKLDQRPGVRGILSDLTCDSDGKINKF

SEQ ID NO: 11506 - protein, 230 aa, Gloeobacter violaceus PCC 7421
MDLDILKQTAARRAVELVEDGMVVGLGTGSTAAFAVSVLAERVRLGLRVVGIPTSERTARQAEAEGIVLGTLAEQSRVDLTIDGADEVALGELALIKGLGGALLREKIVAAASERLIIIVDATKLVEQLGSHGPLPVEVAPFGWQATARALERLGAEVNLRAQHGQAFLTDGGHYILDCRFGPIARPAELEAAIDRIPGVVESGLFVGMASAVIVADEGGIEVLTPSAAP

SEQ ID NO: 11507 - protein, 406 aa, Theobroma cacao
YQGVYPVKSNQDRFVVEDIVKFGSSFRFGLEAGSKPELLLAMSCLCKGNPEALLVCNGFKDAEYISLALLARKLALKHVIVLEQEEEVDMVIDISQKLSVRPVIGVRAKLRTKHSGHFGSTSGEKGKFGLTTTQVLRVVKKLQDSGMLDCLQLLHFHIGSQIPSTALLSDGVGEAAQIYSELVRLGARMKVVDFGGGLGIDYNGSKSGDSDLSVPYGLQEYAHVVNAIRFVCDRKSVKHPVICSESGRAIVSHHSILIFEAICLTAPATHNEPINIPFIMEGLSEDACADYWNLRDTAMRTGDGAFWFYADQWKQRCVEQFKEGTLGIEQLASVDGLCEWVLKAIGASDPVHTYNINLSVFTSIPDLWGIDQLFPIVPIHKLDQRPGARGILSDLTCDSDGKINKF

SEQ ID NO: 11508 - protein, 299 aa, Triticum aestivum
  misc_feature (40)..(40): Xaa can be any naturally occurring amino acid
  misc_feature (113)..(113): Xaa can be any naturally occurring amino acid
  misc_feature (124)..(124): Xaa can be any naturally occurring amino acid
MKTLLILTILAMATTIATANMQVDPSSRVQWPQEQPPPQXQQPFSQQPQQIFPQPQQTFPHQPQQAFPQPQQTFPRRPQQQFPQPQQPQQPFPQPQQPQLPFPQQPQQPFPQXPQQPQQPFPQXSQQPQQPFPQPQQQFPQPQQPQQSFPQQQQWMIQSFLQQQMNPCKNFLLQQCNPVSLVSSLVSIILPRSDCQLMQQQCCQQLAQIPQQLQCAAIHSVVHSIIMQQEQRQGVQIRRPLFQLVQGQGIIQPQQPAQLEVIRSLVLRTLPTMCNVYVSPDCSTINAPFASIVVGIGGQ

SEQ ID NO: 11509 - protein, 408 aa, Carica papaya
YQGVYPVKSNQDRFVVEDIVKFGSSFRFGLEAGSKPELLLAMSCLCKGSPDAFLVCNGFKDAEYISLALFARKLALNTVIVLEQEEEIDLVIDLSQKLSVKPVIGVRAKLRTKHSGHFGSTSGEKGKFGLTTTQILRVVGKLKQAGMLDCLQLLHFHIGSQIPSTALLSDGVGEAAQIYCELTRLGARMQVVDIGGGLGIDYDGSKSGESDLSVAYSLEEYAAAVVRTVAFVCDRKSVKHPVICSESGRAIVSHHSVLIFEAMSVTGPARRNEYPTDLQFFFDGFKDDARAAYLNLAIADARGDYDTCWFYADQLKERCVEDFKEGTLCIEQLAAVDGLCDFVSKVIGASEPVRTYHVNLSIFTSIPDFWSIGQIFPIVPIHRLDERPEVRGTLSDLTCDSDGKIDKF

SEQ ID NO: 11510 - protein, 427 aa, Pirellula sp. 1
MMNSVWRPYCQMKTAPPPMKIVATEGCHLIGQNGECWIDGMASWWSACHGYNHPQVRDAVTEQLHRMPHVMFGGITHEPAERLANRLAELAPDDLNHVFFSDSGSVAVEVAMKMAIGHWRRHDRPGRTRFLAFDNAYHGDTTGAMSLCDPQRSMHARYSGAITQQYHVALPRDATTEAVLERTLAAHSDSIAGVFVEPLVQGAGGMRFHDVITLRRIRDACKRHDVLLIADEIATGFQRTGKMFAVDHTADLQSPVVPDILCLGKALTAGTMSMAVTIARSHVFDSFYSDDPGAALMHGPTFMANPLACSAANASLDLFEGNPYDVEKIETILRERLSVLRDIDNVADVRCFGAIGVVQFRDPPKMQMVQDELVRRGVWLRPFGDCLYTTPPLCINEDALHRICDAMIEATRATMPRSDSPMCNQLR

SEQ ID NO: 11511 - protein, 104 aa, Zea mays
MHGRTAMAVACLLCMTALLLVQDVQSRRLLWTEQEKKQTHGGLVGNHGAADRRSTSLQEPCSGATGGGGTGSADKQGELPCDDDTSKWTELHTDYIYTQDFKHP

SEQ ID NO: 11512 - protein, 245 aa, Zea mays
  misc_feature (28)..(28): Xaa can be any naturally occurring amino acid
MAKNYPTVSAEYSEAVEKARRKLRALIXPLMLRLAWHSAGTFDVSSRTGGPFGTMKHLFYLAHGANAGLDIAVRLLEPIKEEFPILSYADFYQLAGVVAVEVTGGPEIPFHPGREDKPQPPPEGRLPDATKGSDHLRQVFGKQMGLSDQDIVALSGGHTLGRCHKERSGFEGAWTTNPLVFDNSYFKELLSGDKEGLLQLPSDKALLSDPVFRPLVEKYAVDEKAFFDDYKEAHLKLSELGFADA

SEQ ID NO: 11513 - protein, 566 aa, Triticum aestivum
  misc_feature (322)..(322): Xaa can be any naturally occurring amino acid
  misc_feature (342)..(342): Xaa can be any naturally occurring amino acid
  misc_feature (348)..(348): Xaa can be any naturally occurring amino acid
  misc_feature (376)..(376): Xaa can be any naturally occurring amino acid
MAAAAVASNGGAAPVPGRLASVYSEVQTSRIAHALPLPSVLRSHFTLADGPASTAAGSPDEIAKLFPCLYGQPSAAVVPSAEPVETKPLKIGVVLSGGQAPGGHNVICGIFDYLQERAKGSTMYGFKGGPAGVMKGKYVELTTDFVYPYRNQGGFDMICSGRDKIETPEQFQQAEDTVNRLDLDGLVVIGGDDSNTNACLLGEYFRGRNLKTRVIGCPKTIDGDLKCKEVPTSFGFDTACKIYSEMIGNVMTDARSTGKYYHFVRLMGRAASHITLECALQTHPNVALIGEEVAEKREGVGVGAASLAMAHRARSVSRRREXFGGWGVRDDGGVVDGDEGVXRCIGEXGSVLEGIFGEGEGGWLEASRVLGGTARXFDFLPKTIQEQLLLERDPHGNVQVAKIETEKMLIAMVETELEKRRAAGKYSAHFRGQSHFFGYEGRCGLPTNFDSSYCYALGYGAGALLQFGKTGLISSVGNLAAPVEEWTVGGTALTALMDVERRHGKNKPVIKKAMVELDAAPFKKFASLRDEWASKNRYISPGPIQFSGPGSDASNHTLMLELGAEI

SEQ ID NO: 11514 - protein, 182 aa, Spirodela punctata
MGNCFSQSTQTRGSKRNQKPDPLDEPSTRQAQNGGSANAPPQKPPGAVTGVLRQPPAKGSAAVGPVLGRRMEDVRQTYAIGKELGRGQFGVTHLCTDRVTGKQFACKTIAKRKLVNKEDIEDVRREVQIMHHLTGQQNIVELVGAYEDKQSVHLVMELCAGGELFDRIIAKGHYTERAAASL

SEQ ID NO: 11515 - protein, 190 aa, Arabidopsis lyrata subsp. petraea
HFLSFLLIPIMAIVAVELLRMGPEEILNVWNSLQFDLVQVLCSSFFVIFISTVYFMSKPRTIYLVDYSCYKPPVTCRVPFATFMEHSRLNLKDNPKSVEFQMRILERSGLGEETCLPPAIHYIPPTPTMDAARSEAQMVIFTAMDDLFKKTGLKPKDVDILIVNCSLFSPTPSLSAMVINKYKLRSNIKS

SEQ ID NO: 11516 - protein, 81 aa, Zea mays
MTEGTARGGDILIAIILPPLGVFLKFGCKVEFWLCLLLTFLVYLPGIIYAIYVITKDYPASADIPRQGERASRSHSVRNGD

SEQ ID NO: 11517 - protein, 480 aa, Lactobacillus johnsonii NCC 533
MTISNKVMLITYPDSLGKNIKDLDDVLHTDLKGAVGGVHLLPFFPSTGDRGFAPTDYSMVDPQFGDWSDVEKLGEDYYLMFDFMINHISRQSKYYKDFQKNKDQSPYADLFLSWDKFWPKNRPTQKDIDLIYKRKDRAPYQEITFADGSKEKLWNTFGEEQIDLDVRKDVTKQFIKQTLNNLIDHGSDIIRLDAFAYAIKKLDTNDFFVEPEIWDLLKEVQDDISAKGALILPEIHEHYSMPFKIARHGYFIYDFALPMVVLYSLYSGKSQRLASWLKKSPMKQFTTLDTHDGIGVVDARDILTPNEIGYTSNELYKVGANVKKKYSSAEYHNLDIYQINSTFYSALGDDDKKYFMARLLQVFAPGIPQVYYVGMLAGKNDIELLEKTKEGRNINRHYYSREEIHEEVQRPVVSSLINLLRFRNNEAAFDLNGSIEVTTPTENEIHIIRLNQDKTRKAELRANLETLAYKVLVNGREMAF

SEQ ID NO: 11518 - protein, 484 aa, Chloroflexus aurantiacus
MDYPFFHVSHYIDGQFVDGGSRFDILYPATNQVIGSAPEAGADEVDAAVAAASRAFRQWSRMPAAERRLILKRFAQLIRDHEAELAAIETWDVGRPITENRSGYIPRIAANIEFFADFAVTHGSESYPMDNGYINYVLRQPVGVAALIAPWNIPLLQATWKMGPALAFGNTVVLKPAELTPIGTWRLAQLAHAAGVPAGVINVIHGFGPNSAGALLTRHPDVKLISFTGETTTGKIIMATAAPTLKRVSFELGGKGANIIFADADLDRAVAISLRSSFFNQGEFCLAGPRLLVQRPIYEAFLTRFQRATSQLQVGDPFDPQTRVGALISREHYERVTGFIDLARADGAHILTGGTDPVLPEPFAQGNFLQPTIITDVKPHDQVCQDEIFGPVVTVVPFDDEEEAIAIANGVSYGLSAVVQTRDVGRAVRMGSALEAGTIWINDFFVRDLRVPFGGMKQSGIGREGGHYSLEFYTEAKTICLSNQ

SEQ ID NO: 11519 - protein, 143 aa, Zea mays
MAMAYKMATEGMNVKEECQRWFMEMKWKKVHRFVVYKIDERSRAVLVDKVGGPGEGYEELVAALPGDDCRYAVFDFDFVTVDNCQKSKIFFIAWSPAASRIRAKILYATSKQGLRRLLDGVHYEVQATDPSEMGFDVIRGRAQ

SEQ ID NO: 11520 - protein, 259 aa, Zea mays
GSERSWSERRACVAMDGAEDDGTEWMMHGAGGKGKGGGALDKNKKRFSDEQTKSLESMFATQAKLEPRQKLQLARELGLQPRQVAIWFQNKRARWKSKQLEREYSALRDDYHALLCSYESLKDEKRALLKQLEKLAEMLHEPPQAGKYYGGNADDVRSGGVGGTKEEEESTDACAGAALYSSEGAGGGRFIAHFLADDDVGAALFRPPSSPQPTAGLLTSSGPPEHQAPFQFHSDCWPSSSAEHTCSGSQWWKLESLSE

SEQ ID NO: 11521 - protein, 330 aa, Magnaporthe grisea 70-15
MDGKRHLNSFQQLEKLGEGTYATVFKGRNRHTGELVALKEIHLDSEEGTPSTAIREISLMKELKHENIVGLHDVIHTENKLMLVFEHMDGDLKKYMDTKGDRGALQPMVIKSFMYQLLKGIDFCHQNRVLHRDLKPQNLLINNKGALKLGDFGLARAFGIPVNTFSNEVVTLWYRAPDVLLGSRTYNTSIDIWSAGCIMAEMFTGRPLFPGTTNEDQIVRIFRIMGTPSERTWPGFSQFPEYKKTFHTYATQDLRNILPQIDATGIDLLGRMLQLRPEMRISAHDALKHPWFNDILMQQHQQQHAIQAQAQAHQARTQSGSTDTFAGAAV

SEQ ID NO: 11522 - protein, 392 aa, Oryza sativa (japonica cultivar-group)
MADEWWSASQRSHGTSACSAAPSPLTADRVSCGWTSPAAAAAAESTSSITFQDPSRSSAAHHQPLSDAASSLGDPHMVDWTQAFLSGRSDASFQAVLQDDMAASTRPFRAQPTAADEAVMTNPFRDMGVGQGLLLDQASAPLHGLSFDAGEPAVAPATHSITTSFGDYQHSASYDAAAAVMQFSQTPRAPSLPAAAQMQFLSGSYQLPFGGAPPLPSQLLLQAMQPKPSCSSNANTLLAKSNSGSAQQICSSEGRKSVSDSPAAAKRPRIEVPSPLPTFKVRKEKLGDRITALQQLVSPFGKTDTASVLHEAIEYIKFLHEQVASLSSPYLKNGNPLQHFQQKGSESTKDAEQPKPDLRSRGLCLVPVASTYTVASETVPEFWHPTFGGTFR

SEQ ID NO: 11523 - protein, 146 aa, Candida albicans SC5314
MSNLQDLINHDDDEYLPSPSPPQQPEPQHASSSELKTSTTEDLPDSVTQEHILTSFEKIKTHFPAARIKKIMQSDEEIGKVAQATPVIVGRALEIFMANLVEVSLLEAKKQGVKRITASHVKSAIENTEQFDFLVEAVEKYPSLKN

SEQ ID NO: 11524 - protein, 423 aa, Methanocaldococcus jannaschii DSM 2661
MLLKNCRIIKDNKIIEGDILIDENGRIKKIAKDIKVDDEIIDIKNSLVIPGVIDAHVHFRWGEEKKEDFLSGSLAGINGGVCFAIDMPNNKPPITTKELFYKKLEDCKKDSKINVFLNFGVTENNYLGTVEDAKAYKIFMVKSVGDLFIEDYSKLKDILNQNKLFCIHAEHKDVINENLKKYQLNSWIDHCKIRDEKSEVEAVKEVIKNLKIIDRQSNKKPHVHFCHISTKEALYLIKKVRQELKNIKITVEVTPHHIYLNKDMAEELKGFGKFNPPLREKDDNIALIKGIVNKDVDIIASDHAPHLLEDKLKNVKNCPSGIPGIETIVPLTLNLVNKGLISLFDAIRVLSKNPAKIFNINNKIEEGNLANLTIIDLKKEGKINAELFKSKAKFSPFDGWEVKGFPIYTVINGTLYEAYGCKC

SEQ ID NO: 11525 - protein, 408 aa, Polanisia dodecandra
YQGVYPVKGNQDRFVVEDIVKFGSSFRFGLEAGSKPEILLAMSCLCKGNPEAFLVCNGFKDAEYISLALLGRKLALNTVIVLEQEEELDLVIDLSQKMNVRPVIGIRAKLRTKHSGHFGSTSGEKGKFGLNTIQIVRVVRKLCQVGMLDCLQLLHFHIGSQIPSTALLSDGVAEAAQLYCELVRLGAQMRVIDVGGGLGIDYDGSKSGESDLSVAYSLEEYAAAVVAAVQFVCERKSVKHPVICSESGRAIVSHHSVLIFEAVSATGPARHAVTPTDLQLMIEGYSEEARADYQNLYAAVMRGEYESCLLYVDQLKQRCVEGFKEGFLSIEQLAAGDGFCELVLKVIGASDPVRTYHVNLSVFTSIPDFWGIGQLFPIVPIHRLDQRPGVRGILSDLTCDSDGKIEKF

SEQ ID NO: 11526 - protein, 129 aa, Thermoplasma acidophilum
MSWQEAEVRELKVGRYILIDDAPCKIVEITMSKPGKHGEAKGRIVAIGVFDNQKRSVVYPVKHKVKIPIIEKKNAQVLSVQNNEVQLMDSETFETFVLPLDPEIADKIKPGMEVPYWETMGMRKIMLQN

SEQ ID NO: 11527 - protein, 313 aa, Zea mays
MQGGATAKQQARDGDRGAAKTPTTEGKGDAAGAKASADVAKGDAAVAKAAGDDVVVGKGDAGNKAGAGAMHHGLSAVEAKDSQTIVALQSPVTVMRPVRGDLEEHLPKPYLARALVAPDIYHPDGTAADEHGHHHMSVLQQHVAFFDRDDNGIIYPWETYSGCRALGFNMILSLLIALVVNGTMSYATLPGWLPSPLFPIYVHNIHKSKHGSDSGTYDNEGRFMPVNFENLFSKYARTSPDRLTYRELWSMTEGFRDAFDLYGWIAAKLEWTILYVLARDDEGYLSREAMRRVYDGSLFEYVERQRAQHAKMS

SEQ ID NO: 11528 - protein, 469 aa, Methanosarcina mazei Go1
MSKNVQKIEKLLIVICMIFIVLPSPALAVTAEENAEAIEGLQTTLTFLWLLIASGLVFFMHAGFSLVETGLTRSKNTANILMKNFMTVVLGILVYWAVGWGVMYGADAAGLIGTDQFFLAGADNATWNSWFFQMVFAATGATIVSGAMAERTNFKAYLVYCVLMVAVIYPIYGHWVWSGADTALLSGADSPIVKAIGVAHHDFAGSGVVHSIGGYSALAGVLLVGARIGKFRDGKAIPIPGHNLTIAFLGTLILALGWLGFNGGSTLNANDPYMNLVVVNTFLAGAVGAVTTMAITWMKTGKPDPSLTANGLLGGLVAVTAPCGSISNWGAIAIGIIAGIIIYAGVMFNENKLKLDDPVGAIAVHGYCGTWGLISVGLFSIGIGNGILADASYAAAVPGLFYGGGVSLLLIQLVAVLITIVWGFGLSFIIFKILDAVIGLRVSEEEEIMGLDICEHGIRAYPEYLMREE

SEQ ID NO: 11529 - protein, 436 aa, Vibrio parahaemolyticus RIMD 2210633
MTLTRRQQIEALEKDWATNPRWKNVKRTYTAEEVVELRGSMVPANTIAQRGADKLWSLVNGSAKKGYVNCLGALTGGQAVQQAKAGIEAIYLSGWQVAADNNTASTMYPDQSLYPVDSVPSVVKRINNSFRRADQIQWANGKSPEDEGGIDYFLPIVADAEAGFGGVLNAYELMKSMIEAGAAGVHFEDQLASVKKCGHMGGKVLVPTQEAVQKLVAARLAADVSGTTTLVIARTDANAADLLTSDCDPYDKDFIEGERTQEGFYRVRAGIDQAISRGLAYAPYADLIWCETATPCLEEARKFAEAIHAEYPDQLLAYNCSPSFNWEKNLDAETIAKFQQELSDMGYKYQFITLAGIHNMWFNMFELAHAYAQGEGMRHYVEKVQRPEFQAAEKGYTFVAHQQEVGTGYFDRMTNTIQGGNSSVTALTGSTEEDQF

SEQ ID NO: 11530 - protein, 407 aa, Arabis drummondii
YQGVYPVKGNQDRFVVEDIVKFGSSFRFGLEAGSKPEILLAMSCLCKGSPDAFLVCNGFKDAEYISLALLGRKLALNTVIVLEQEEELDLVIELSQKMNVRPVIGLRAKLRTKHSGHFGSTSGEKGKFGLTTTQIVRVVRKLSQSGMLDCLQLLHFHIGSQIPSTSLLSDGVAEAAQLYCELVRLGAHMKVIDIGGGLGIDYDGSKSGESDLSVAYSLEEYAEAVVASVRFVCDRRSVKHPVICSESGRAIVSHHSVLIFEAVSADKPMVHQATPDDIQFLLEGDEEARANYEDLYAAVMRGDHESCLLYVDQLKQRCVEGFKEGVLSIEQLASVDGLCEWVLKAIGASDPVHTYNINLSVFTSIPDLWGIDQLFPIVPIHKLDQRPGTRGILSDLTCDSDGKINKF

SEQ ID NO: 11531 - protein, 422 aa, Aquifex aeolicus VF5
MLKLIVKNGYVIDPSQNLEGEFDILVENGKIKKIDKNILVPEAEIIDAKGLIVCPGFIDIHVHLRDPGQTYKEDIESGSRCAVAGGFTTIVCMPNTNPPIDNTTVVNYILQKSKSVGLCRVLPTGTITKGRKGKEIADFYSLKEAGCVAFTDDGSPVMDSSVMRKALELASQLGVPIMDHCEDDKLAYGVINEGEVSALLGLSSRAPEAEEIQIARDGILAQRTGGHVHIQHVSTKLSLEIIEFFKEKGVKITCEVNPNHLLFTEREVLNSGANARVNPPLRKKEDRLALIEGVKRGIIDCFATDHAPHQTFEKELVEFAMPGIIGLQTALPSALELYRKGIISLKKLIEMFTINPARIIGVDLGTLKLGSPADITIFDPNKEWILNEETNLSKSRNTPLWGKVLKGKVIYTIKDGKMVYKD

SEQ ID NO: 11532 - protein, 477 aa, Deinococcus radiodurans R1
MTATPQASARPERPFATVNPYTGETVKTFPFLESAEIPALIERADQAYREWGQRPVTERAAIMRRAAELMLERTDELASLITLEMGKLLREAKGEVALAASILNYYGEQGPSFLEPKTIPVPQGEAAVLHAPLGVLLGIEPWNYPLYQVVRFAAPNLVVGNTVLLKHSELCPQSALALEQLFHDAGVPQGAYTNLFLRIADIEQVIAHPAVQGVSLTGSERAGASVAELAGRHLKKCVLELGGSDPFIVLDAEDLDTTVKAAATGRLSNTGQACIAAKRLMVVDDLYDEFVSRLGQTFSAFVPGDPADPSTRLGPLSSEQAARDLQAQVQDAIDKGATVVAGGQRPEHPGAFVQPTVLTDVTPDMRAYHEELFGPVAVVYRVRDEDEAVALANASTYGLGGAVFSSDLDRAQRVAERLDTGMVWINHPTSSAADLPFGGVKRSGFGRELSSMGMLEFTNQKLVRAFPTKQKPAQVAG

SEQ ID NO: 11533 - protein, 223 aa, Zea mays
MPDSDNDSGGPSNAGGELSSPREQDRFLPIANVSRIMKKALPANAKISKDAKETVQECVSEFISFITGEASDKCQREKRKTINGDDLLWAMTTLGFEDYVEPLKHYLHKFREIEGERAAASAGASGSQQQQQQGELPRGAANAAGYAGYGAPGSGGMMMMMMGQPMYGGSQPQQQPPQPQPPQQQQQQHQQHHMAMGGRGGFGQQGGGGGSSSSSGLGRQDRA

SEQ ID NO: 11534 - protein, 133 aa, Gloeobacter violaceus PCC 7421
MIQQQSRLSVADNTGARELLCIRVLGSTVGSKGLTKGGGNRRYAFVGDIVVAVVKDAAPNMGVKKSEVVRAVVVRTRQAIRRDNGMVIRFDDNAAVIIDKNGNPRGTRVFGPVARELREKNFTKIISLAPEVL

SEQ ID NO: 11535 - protein, 407 aa, Barbarea vulgaris
YQGVYPVKGNQDRFVVEDIVRFGSPFRFGLEAGSKPEILLAMSCLCKGSPDAFLVCNGFKDAEYISLALLGRKLALNTVIVLEQEEELDLVIDLSQKMNVRPVIGLRAKLRTKHSGHFGSTSGEKGKFGLTTTQIVRVVSKLSQSGMLDRLQLLHFHIGSQIPSTSLLSDGVAEAAQLYCELVRLGAHMKVIDIGGGLGIDYDGSKSGESDLSVAYSLEEYAEAVVASVRFVCDRRSVKHPVICSESGRAIVSHHSVLIFEAVSADKPMVHQATPDDIQFLLEGNEEARANYEDLYAAVMRGDHESCLLYVDQLKQRCVEGFKEGVLSIEQLASVDGLCEWVLKAIGASDPVHTYNINLSVFTSIPDLWGIEQLFPIVPIHKLDQRPGARGILSDLTCDSDGKINKF

SEQ ID NO: 11536 - protein, 425 aa, Staphylococcus epidermidis ATCC 12228
MKLIKNGKILKNGILKDTEILIDGKRIKQISSKINASSSNIEVIDAKGNLIAPGFVDVHVHLREPGGEHKETIESGTKAAARGGFTTVCPMPNTRPVPDTVEHVRELRQRISETAQVRVLPYAAITKRQAGTELVDFEKLALEGVFAFTDDGVGVQTASMMYAAMKQAVKVKKPIVAHCEDNSLIYGGAMHKGKRSEELGIPGIPNIAESVQIARDVLLAEATGCHYHVCHVSTKESVRVIRDAKKAGIHVTAEVTPHHLLLTENDVPGDDSNYKMNPPLRSNEDREALLEGLLDGTIDCIATDHAPHAKEEKAQPMTKAPFGIVGSETAFPLLYTHFVRRGNWSLQQLVDYFTIKPATIFNLNYGKLHKDSYADLTIIDLNTEKEIKSEDFLSKADNTPFIGEKVYGNPTLTMLKGEVVFEEEK

SEQ ID NO: 11537 - protein, 493 aa, Schizosaccharomyces pombe
MAPQFKRPELFGFDKSHAQSFVQGKWISSPNNKTFEVDNPATGEIIGKVADVSVEETKKAISAANEAFKTYKNFTHVQRSQLLERWAELIMENKDDLVKMLTLENGKPLSQAEMEVTTCSGYLKWYAAEAVRTFGDVAPSSLQSQNFLISIKQPVGVSALITPWNFPAAMIARKGGAALAAGCTAIFLPAFRTPYVCLGLVRLAQEAGFPDGVLNVITSSDASAHGKELTTNPIVRKVSFTGSTNVGKILMGQSASTIKKVSMELGGNAPFIVFPDFPIDQAVESFCTIKFNSCGQVCVCPNRVYVHKNVYDEFVSKLTEKVKTIKVGDGFDSSSAVGPLISQDGCKKVSKHIEDAVSKGAKITVGGKEISSSKGYFFEPTVLSGVTQDMLVASEETFGPLASVFKFDDTEEVIEWANDSDVGLAGYVFTNNLSTMIHVAKELEVGLVGANIEMVDEPFISFGGIKQSGFGKEAGRLGVQEFMVVKEINLKTL

SEQ ID NO: 11538 - protein, 212 aa, Arabidopsis lyrata subsp. petraea
VVIDNLTNVWARLYVPMMTTTKSSVSKLLPLIVYFHGGGFCVGSTSWSCYHEFLARLSSRSRCMVMSVDYRLAPENPLPAAYEDGVNAILWLNKARNDNLWTKLCDFGRIFLAGDSAGGNIADQVAARLASTEDLTLKIEGTILIQPFYGGEERTESEKRVGNNKSSVRTLEGSDAWWRLSLPRGADREHPYCKPVKINSSTVIRTLVCVAE

SEQ ID NO: 11539 - protein, 428 aa, Pseudomonas aeruginosa
MADKKAQLIIEGSAPVELPVLSGTMGPDVVDVRGLTATGHFTFDPGFMSTASCESKITYIDGDKGVLLHRGYPIEQLAEKSDYLETCYLLLNGELPTAAQKEQFVGTIKNHTMVHEQLKTFFNGFRRDAHPMAVMCGVIGALSAFYHDSLDITNPKHRQVSAHRLIAKMPTIAAMVYKYSKGEPMMYPRNDLNYAENFLHMMFNTPCETKPISPVLAKAMDRIFILHADHEQNASTSTVRLAGSSGANPFACIASGIAALWGPAHGGANEAVLRMLDEIGDVSNIDKFVEKAKDKNDPFKLMGFGHRVYKNFDPRAKVMKQTCDEVLQELGINDPQLELAMKLEEIARHDPYFVERNLYPNVDFYSGIILKAIGIPTSMFTVIFALARTVGWISHWQEMLSGPYKIGRPRQLYTGHTQRDFTALKDRG

SEQ ID NO: 11540 - protein, 392 aa, Zea mays
  misc_feature (134)..(134): Xaa can be any naturally occurring amino acid
  misc_feature (252)..(252): Xaa can be any naturally occurring amino acid
MEVGDARNGSAAAALTKGSADDAARKPLPPCCVKAKARVPETEANCHDTVVSGWFTEPRSRFGKTSKVQYFNNPMWPGEAHSLKVEKILFQGKSPYQEILVFESSTYGNVLVLDGIVQLTDKDECAYQEMVTHXFPLCSIPAPKNVLVVGGGDGGVLREIARHDSVETIDICEIDQLVIDVCKEFFPNLSIGFKDPRVRLHVGDAVDFLRNSPEGKYDAIIVDSSDPIGPAQGTRWRKLFIQTIARALKPGXGVLCNLAESMWLHTHLIQDMLAICRQTFKGAVHYAWTSVPTYPSGVIGFLLCAKEGRAVNFLTPVNPIEKIEGTTKAGRELRFYNSEIHRAAFVLPTFVRRELEAYTTPSTSAENEKPKESVSEPQKIKILSNNAILTAS

SEQ ID NO: 11541 - protein, 452 aa, Burkholderia fungorum LB400
MLIAPCDKPGRRPALNNYIMRNEMTTRANLTSPKTNDYVSREEALEILAVKMQSFYTYVSRGLIRRLDQPGKKRKLYLKSDVQRLAAKSQARSNTGAKAGDSMRFGNPIIQTWICEITPRGPCYRSRLATDLAAANVSYESVAELLWLGTFRTPEVPWKAEPLPKGLDAWIPLAKSMAGTGNGLQIINLLLAALRALDGNELDTNYDNVIPLARRLIQVLAGVGGFLGEDQQLERFRTGDSVAECFVRGLGFGGRPEVSEAINKALVISAEHELTPPTFAARVCASTGSDLYACVATGILAHMGSLQGGGADGAEVVLEDLLRPARRKMLRQRWATKYDFPGFNHPLYERDPRAVALLDIVRGLKSPHPDASKALKLIDEIEQEVNFYPNITAALVVLCRSLGLPRRAANLLFSVSRSAGWIAHALEQRVAGYMLRPRAKFSSQSDSLTNNV

SEQ ID NO: 11542 - protein, 445 aa, Zea mays
  misc_feature (272)..(272): Xaa can be any naturally occurring amino acid
  misc_feature (311)..(311): Xaa can be any naturally occurring amino acid
  misc_feature (351)..(351): Xaa can be any naturally occurring amino acid
MYRAKRAALSPKVKRRVGKYELGRTIGEGTFAKVRFAKNTENGEPVAIKILDKEKVKRHRLVEQIKREICIMKLVRHPNVVRLFEVMGSKARIFIVLEYVTGGELFEIIATNGRLKEDEARKYFQQLINAVDYCHSRGVYHRDLKLENLLLDAAGNLKVSDFGLSALTEQVKADGLLHTTCGTPNYVAPEVIEDGGYDGATADIWSCGVILFVLLAGYLPFEDDNIIALYKKISAAQFSCPSWFSAGAKNMSTSCLDFLFTTTMVVLSRFEXLENEPAVDLRTGGSGSRVSGHVAPPKSPDFFQEYGMGNXFQKKSNNASKTQVEETDEARKKFSNAKAITTSQFLQCPPXEIITKIEEAAKPLGFDVQKKKYKMRMENPKAGRKGNLNVATEVFQIAPSLHVVELKKAKGDTLEFQKFYRSLSTQLKDVVWKCDGEVDGNSAAA

SEQ ID NO: 11543 - protein, 140 aa, Brassica napus
RASNVVYLRCAAELLEMTEEYGEGNLISQTETFFNQVVLKSWEDSVKALQSCDEVLEYADELNITKKCIESLAMRAFTDPNLFGWPVVEHGGGPMQSPGGSVLWNGISTGARPRQTNSDWWYEDASMLSFPLFQRLITVM

SEQ ID NO: 11544 - protein, 315 aa, Hyoscyamus niger
MEVTNQSNGCSNNEKESPYISSVLPGWFSEISPLWPGEAHSLKVEKILFQGKSDYQNVMVFQSSTYGKVLVLDGVIQLTERDECAYQEMITHLPLCSIPNPKKVLVIGGGDGGVLREVSRHSSVEQIDICEIDKMVVEVAKEFFPDVAVGYEDPRVNLHIGDGVAFLKNVPAGTYDAVIVDSSDPIGPAQELFEKPFFESIARALRPGGVVSTQAESIWLHMHIIEEIVANCRQIFKGSVNYAWTTVPTYPSGMIGFMLCSTEGPAVDFKNPINPIDDESGPKTIAPLKFYNSEIHQASFCLPSFAKRVIESKGK

SEQ ID NO: 11545 - protein, 201 aa, Streptococcus agalactiae
AIKQQTIFDIDNAKTEVEIDNLVHDAFSKMNATVAKFQKGLETNTPETPDTPKIPEIPQAPDTPQAPDTPHVPESPKAPEAPRVPESPKTPEAPHVPESPKAPEAPRVPESPKTPEAPHVPESPKTPEAPKIPEPPKTPDVPKLPDVPKLPDAPKLPDGLNKVGQAVFTSTDGNTKVTVVFDKPTDADKLHLKEVTTKELA

SEQ ID NO: 11546 - protein, 201 aa, Streptococcus agalactiae
AIKQQTIFDIDNAKTEVEIDNLVHDAFSKMNATVAKFQKGLETNTPETPDTPKIPELPQAPDTPQAPDTPHVPESPKAPEAPRVPESPKTPDTPHVPESPKAPEAPRVPESPKTPEAPHVPESPKTPEAPKIPEPPKTPDVPKLPDVPKLPDAPKLPDGLNKVGQAVFTSTDGNTKVTVVFDKPTDADKLHLKEVTTKELA

SEQ ID NO: 11547 - protein, 471 aa, Vibrio vulnificus YJ016
MAMKLVWLRRDLRCVDNTALNHAIATSQEVVACFVATPLQWRDHHMAPMQADLIARRLAVLAEELNALNIPLLYDEVDDYAQSATRVANWAEQLAVSEVVLNREYEVNERVRDEQLVNRLASSEMGVLDVEDKCVQAPGCVLNKQGDYFKVFTPFKKAWLKSFIPPQIIKTSAAQPVVLPEALQSSLWHEQAPFSYPRQSSEAWSVDSQQIRETLRRFCHEEVDRYHEQRDFPATAGTSVLSPYLAIGAISVRQCIARLYWQQSYLSNGREVWLSELIWREFYHHLIHFEPKLVKGQGFVEWEKHLLWPAKPDWFERWCRGETGYPIVDAAMRQLNQTGWMHNRLRMIVASFLTKDLHVNWRLGEQYFMQKLVDGDFAANNGGWQWCASTGCDGQPYFRIFNPITQGEKFDPNGEFVKHWLPELAEVPSKFVHQPWKWLGHMRLDYPAPMVDHKQEREITLSLYTQAKDCL

SEQ ID NO: 11548 - protein, 310 aa, Neurospora crassa
MADHTEVDLDSIIDRLLEVRGSRPGKQVQLLEAEIRYLCTKAREIFISQPILLELEAPIKICGDIHGQYYDLLRLFEYGGFPPEANYLFLGDYVDRGKQSLETICLLLAYKIKYPENFFILRGNHECASINRIYGFYDECKRRYNIKLWKTFTDCFNCLPIAAIIDEKIFTMHGGLSPDLNSMEQIRRVMRPTDIPDCGLLCDLLWSDPDKDITGWSENDRGVSFTFGPDVVSRFLQKHDMDLICRAHQVVEDGYEFFSKRQLVTLFSAPNYCGEFDNAGAMMSVDESLLCSFQILKPAEKKQKYVPSLR

SEQ ID NO: 11549 - protein, 469 aa, Capsicum chinense
PIPVPVFGNWLQVGDDLNHRNLTDYAKKFGDIFLLRMGQRNLVVVSSPESAKEVLHTQGVEFGSRTRNVVFDIFTGKGQDMVFTVYGEHWRKMRRIMTVPFFTNKVVQQYRGGWESEVASVVEDVKKNPESATNGIFLRKRLQLMMYNNMFRIMFDRRFESEDDPLFVKLRALNGERSRLAQSFEYNYGDFIPIFRPFLRGYLKICKEVKEKRLQLFKDYFVDERKKLANTKSMDSNALTCAIHHILDAQQKGEINEDNVLYIVENINVAAIQTTLWSIEWGIAELVNHPHIQQKLREEIDTVLGPGVQVTEPDTQKLPYLQAVIKETLRLRMAIPLLVPHMSLHDAKLAVYDIPAESKILVNAWWLANNPAHWKKPEEFRPERFLEEEKHVDANGNDFRFLPFGVGRRSCPGIILALPILGITLGRLVQNFEMFPPPGQSKLDTSEKGGQFSLHILKHSTIVMKPRSF

SEQ ID NO: 11550 - protein, 207 aa, Streptococcus agalactiae
AIKQQTIFDIDNAKTEVEIDNLVHDAFSKMNATVAKFQKGLETNTPETPDTPKIPELPQAPDTPQAPDTPHVPESPKAPEAPRVPESPKTPEAPHVPESPKAPEAPRVPESPKTPEAPHVPESPKTPEAPKIPEPPKTPDVPKLPDVPKLPDVPKLPDAPKLPDGLNKVGQAVFTSTDGNTKVTVVFDKPTDADKLHLKEVTTKELA

SEQ ID NO: 11551 - protein, 138 aa, Triticum aestivum
VAPFQGLKSTAGLPVSRRSNGASLGSVSNGGRIRCMQVWPIEGIKKFETLSYLPPLSTEALLKQVDYLIRSKWVPCLEFSKVGFIFREHNASPVEVEEVKKEYPDAYVRIIGFDNMRQVQCVSFIAFKPPGCEESGKA

SEQ ID NO: 11552 - protein, 251 aa, Glycine max
  misc_feature (91)..(91): Xaa can be any naturally occurring amino acid
MTKNYPAVSEEYQKAIEKCKRKLRGLIAEKNCAPIMVRLAWHSAGTFDCASRTGGPFGTMRFDDELAHGANNGLHIALRLLEPIREQFPTXISHADFHQLAGVVAVEVTGGPEIPFHPGREDKSQPPPEGRLPDATKGCDHLRQVFLKQMGLTDQDIVALSGAHTLGRCHKDRSGFEGAWTSNPLIFDNSYFKELLSGEKEGLLQLPSDKALLDDPVFRPLVEKYAADEEAFFADYAEAHLKLSELGFADA

SEQ ID NO: 11553 - protein, 245 aa, Aspergillus nidulans FGSC A4
MKSPIPLLHGTGSIPPIGLGTWQSSANATCLAVKHALQHGYRHIDTALNYGNEKEVGQGIRDSGIPREEIWVTTKLDNHWHHRVREGLESSLRDLGLEYVDLYLIHFPCSTDPEDRSKHLKDWDFVRTWQEMQKLLGTGKVRNIGVSNFQISHLERLLNDPSCKVIPAVNQIELHPYNPSLRWNLQRGVSVIPKSITPARIDSNIDLEGFELSPDEMGEISAIKTRAKVVGDSWMPIRVFTGDDE

SEQ ID NO: 11554 - protein, 207 aa, Streptococcus agalactiae
AIKQQTIFDIDNAKTEVEIDNLVHDAFSKMNATVAKFQKGLETNTPETPDTPKIPELPQAPDTPQAPDTPHVPESPKAPEAPRVPESPKTPDTPHVPESPKAPEAPRVPESPKTPEAPHVPESPKTPEAPKIPEPPKTPDVPKLPDVPKLPDVPKLPDAPKLPDGLNKVGQAVFTSTDGNTKVTVVFDKPTDADKLHLKEVTTKELA

SEQ ID NO: 11555 - protein, 267 aa, Xanthomonas campestris pv. campestris str. ATCC 33913
MTVPAFGLGTFRLKDQVVIDSVRNALALGYRAIDTAQIYDNEAQVGQAIADAGVPRDQLFVTTKIWVDRFSRDTLQPSLQESLRKLGTDYVDLTLIHWPSPKDQVPMREYLEALADAKAQGLTRAIGVSNFTIALTRQAIEILGADAIATNQIEVHPYLQNRTLIAFLREQGIHVTSYMTLAVGEVLKDPVIQAIARRHDATPAQVTLAWALQQGYSVIPSSTKRANLESNLKAQSLHLSEQDMAEIAALDRGERLANPKAIAPDWD

SEQ ID NO: 11556 - protein, 213 aa, Streptococcus agalactiae
AIKQQTIFDIDNAKTEVEIDNLVHDAFSKMNATVAKFQKGLETNTPETPDTPKIPELPQAPDTPQAPDTPHVPESPKAPEAPRVPESPKAPEAPRVPESPKTPEAPHVPESPKAPEAPRVPESPKTPEAPHVPESPKTPEAPKIPEPPKTPDVPKLPDVPKLPDAPKLPDGLNKVGQAVFTSTDGNTKVTVVFDKPTDADKLHLKEVTTKELA

SEQ ID NO: 11557 - protein, 197 aa, Populus kitakamiensis
MAFAGTTQKCMACDKTVYLVDKLTADNRAYHKACFRCHHCKGTLKLGNYNSFEGVLYCRPHFDQLFKRTGSLDKSFEGTPKIVKPEKPVDGEKPVSTKVSTMFAGTREKCFGCKNTVYPTEKVSVNGTPYHKSCFKCIHGGCTISPSNYIAHEGRLYCKHHHNQLIKEKGNLSQLEGDIEKDSMSNKTNGREVAAES

SEQ ID NO: 11558 - protein, 461 aa, Mycobacterium tuberculosis H37Rv
MTATLTKTLGSLDDFRGTLCVPGDPDYPRVRAIWNGQVAREPALIATCHDACDVRTVLRRAVDAGMVTAVRGGGHNVAGTALCDGGVVIDLSAMRAVSLDPATGRVRVQGGATLADLDHATVPFARVAPAGIVTTTGVGGLTLGGGVGWTTRRFGLSCDNLVAVRLVTAAGDYLSVDDERDPELMWGLRGGGGNFGIVTEFEFATHPFGPVAVAGFVVYRLDDGPAVLRGYRQFAAAAPEEVTTIVVLRHAPPAPWIPVDQRGKPVVMIGAVHTGSIQTGIEALRPVKSLARPVADTVWPTPFLAHQAVLDASNPAGHRYYWKSDHLAELNDEAIDLLVEQTAQLSSPDSLIGIFQLGGAAARGGERSCFPSRHARFMVNYATHWTEAREDDLHRQWTRDAIEALAPYGLGTAYVNFTADDAPMHVETLYSTTEFSRLVTLKNRLDPDNVFRNNHNIRPSA

SEQ ID NO: 11559 - protein, 289 aa, Hordeum vulgare
ITTTTMQFNPSGLELERPQQLFPQWQPLPQQPPFLQQEPEQPYPQQQPLPQQQPFPQQPQLPHQHQFPQQLPQQQFPQQMPLQPQQQFPQQMPLQPQQQPQFPQQKPFGQYQQPLTQQPYPQQQPLAQQQPSIEEQHQLNLCKEFLLQQCTLDEKVPLLQSVISFLRPHISQQNSCQLKRQQCCQQLANINEQSRCPAIQTIVHAIVMQQQVQQQVGHGFVQSQLQQLGQGMPIQLQQQPGQAFVLPQQQAQFKVVGSLVIQTLPMLCNVHVPPYCSPFGSMATGSGGQ

SEQ ID NO: 11560 - protein, 180 aa, Spinacia oleracea
MASSVLSSAAVATVSRTPAQASMVAPFTGLKSTVGFPATKKNDDITSLASNGGRVQCMKVWPTQNMKRYETLSYLPPLTTDQLARQVDYLLNNKWVPCLEFETDHGFVYREHHNSPGYYDGRYWTMWKLPMFGCTDPAQVLNELEECKKEYPNAFIRIIGFDSNRQVQCVSFIAYKPAGY

SEQ ID NO: 11561 - protein, 197 aa, Populus kitakamiensis
MAFAGTTQKCMACDKTVYLVDKLTADNRAYHKACFRCHHCKGTLKLGNYNSFEGVLYCRPHFDQLFKRTGSLDKSFEGTPKIVKPEKPVDGEKPVSTKVSTMFAGTREKCFGCKNTVYPTEKVSVNGTPYHKSCFKCIHGGCTISPSNYIAHEGRLYCKHHHNQLIKEKGNLSQLEGDIEKDSMNNKTNGREVAAES

SEQ ID NO: 11562 - protein, 191 aa, Saccharomyces cerevisiae
MQTLKCVVVGDGAVGKTCLLISYTTNQFPADYVPTVFDNYAVTVMIGDEPYTLGLFDTAGQEDYDRLRPLSYPSTDVFLVCFSVISPPSFENVKEKWFPEVHHHCPGVPCLVVGTQIDLRDDKVIIEKLQRQRLRPITSEQGSRLARELKAVKYVECSALTQRGLKNVFDEAIVAALEPPVIKKSKKCAIL

SEQ ID NO: 11563 - protein, 1684 aa, Gibberella zeae PH-1
MPGSTIDTPAVALSFANNFWGKEDAGVTPLLSRMTAAKTTCDELRAFYGARASIEEEYSRKLLNLSRKALGSQESGTLKTSLDTVRGEVEQMAKQHQLIGAEMKSELEEPLAAFTGGMKERRKIIQNTVEKLLKVKMQQTQQVNKTRDKYEQECLKIKGYLAQGHMVMGQEERRNKAKLEKTQIALAASSTEYENAVKALEDTTARWNREWKAAADKFQDLEEERLDFTKSSMWTFANIASTVCVSDDSSCEKIRLSLEVMDVEKDIITFITEKGTGQEIPDAPKYINFCRGDVTDNQSETSEDDNYSVAQFPRMINPAFRSSSPQPSTFESHHDPNSALAKELAHKDNAPAKREPNAPVQKSATLPPDDILQIGPQKTQPQQIQAAPQQRQQHQPQMQHSSQLQHPSQLQHHSQLQRPSQMQRPSQLQHPSQLQHSSQPHHPSQLQHPSQLQHPSQSQRSSQPQRPSQHPAQLQHQPQQQYSPQRQHPSQQPPHSADHRMQQQMRPLEMRPADMRNANMRQHEPRPSLEMRYSGEVRPSMQSRPSVDTRQVPDARTSLELRRPIEDPSRRQQPATYTAYDANQHGAVSAVPHDPYAAEGMTMLCRTGPSPISDHDSQVTSARPSSRDSHSDYSNPNSFSSVEPPSGKTSPVKQDPIRQDPAPAPAPAPVQTRAPPPVTAPAPAPVQARAPAPVAAPAPVPVQARASVPTPVPALTPAPKPAPAPVAAASAPTPSAVTPATSPVKLVAKKKSGGFLKNHSPFRRKSQKELQQPNRNTWHASNTPSLSSPVRRAQPQTHEPTNNVVTQERTQSPEPIDANASLALGVGQNVFPVSTPDTKKKPGAAAAQEPAEEMDPIALALAELKGVTLGKNSSMRVSADHYSGIATPASGSEAASRQASATRPAPTPSNPDIAAAKRGTPPPSYQTPTSRLGVPPPAVTSRAMKEATKKATSQTRSMFENGGSTPGTFNSTSSRTNTRATEAKRAEPSLSQSVPPTASRPTTRTATHGRGESGSYSSASMSRPGTRGTEMGRGEPAGYGTSPARSGTRATDMSRPDTRGFNASPLSRPGTRGSDMSRGGSGIYGTSPGSRPGTRGTDMPRATSPAPAPARSVSPQPPINDNMSYRSVSPNPYAASQRSPSVMSSPQKHGSAQGYYPQSPASRGPSPSPYGQQSRPGSGYAGSDMAIQLAPVSDPYGSVRSGGSRPASRANSYYDDGSTRQRSQSVADPSRLYTPDGRAILHYARALYMYQAAIPEELGFAKGDYLAVLRHQDDGWWEAEVHGGDGSVGLVPIVTQLTEYMLRIGELIRLSMETLQETARVVTSKPVQRAVVNTVLLVSTAATLFCTAAIASVLFFQNFLPHEVVTLPVHLQYGSGINPYGIASLQTPPMKTQQEYDVSLLLSMPRSVPNVERGNFMISLHMLGAKADVWLHAQAEQHASSHEGFGQANVLFSSRRPALFPYVDPLVSVASRVLFLIYHLFTPGSSTNSVIIPLAERVSFSKDSLLPKSAYIEVEAGQTIQVYNAYLQLTAQLRGLRWMMVHYRISTFLALTVVFWAFEVIFMGVAWGIWSVASGPAEEDDAKIRRLKGLRDDHEDEPTDHEETFPTYGKQQPLKYEPDIKPEQDPEQPLSEIPRLGADADDEDDGSFDDKDEEDVQHRDSGIGTSYSEEGTSSIRRRTSRNRL

SEQ ID NO: 11564 - protein, 294 aa, Gibberella zeae PH-1
MTSKLALSSTKKLNSGYQIPLLGYGVYQVPKDQASDVCKKALEIGYRHIDSASGYYNQGPSAAGIQAAGVPREEVFFTTKIFTRQFPLNYENAHKQVDIALDETKLDYLDLVLIHAPYGGSDARKGAWKALVECVEAGKVRSLGVSNYGVHHLDELEAYIKELETERGGAGKGGVISVGQWEVHPWMTRPDIVKWCQDRNIAVEAYCPIVRGERFDDPKVKALAEKYGKSPAQILLRWSLQRGYVPLVKSVTPSRILENTQLYDFELTEEEVEDLATTDYSPCAWDPTVEPLEK

SEQ ID NO: 11565 - protein, 403 aa, Brassica oleracea
YQGVYPVKGNQDRFVVEDIVRFGSQFRFGLEAGSKPEILLAMSCLCKGNPDAFLVCNGFKDAEYIFLALLGRKLALNTVIVLEQEEELDLVIDLSQKMNVRPVIGLRAKLRTKHSGHFGSTSGEKGKFGLTTTQIVRVMRKLSQSGMLDCLQLLHFHIGSQIPSTSLLSDGVAEAAQLYCELVRLGAHMKVIDIGGGLGIDYDGSKSGESDLSVAYTLEEYAEAVVASVRFVCDRRSVKHPVICSESGRAIVSHHSVLIFEAVSAVKPMAHQANPDDIQFLLEGNEEYEDLYAAVMRGDHESCLLYVDQLKQRCVEGFKDGVLSIEQLASVDGLCEWVLKAIGASDPVHTYNINLSVFTSIPDLWGIEQLFPIVPIHKLDQRPGTRGILSDLTCDSDGKISKF

SEQ ID NO: 11566 - protein, 164 aa, Glycine max
  misc_feature (73)..(73): Xaa can be any naturally occurring amino acid
  misc_feature (90)..(90): Xaa can be any naturally occurring amino acid
  misc_feature (129)..(129): Xaa can be any naturally occurring amino acid
PTYARNGSRGLNPGSFLTITEGSDSGGYYGQWRTIRRTAVTTTLAGSTADLTTLLSKRTLAGHWNVIDLRYGXLGGYAAITYHCAVVQPXAPIVRGFVAAWVLIGLNKLAAKVEYDDPLDAAQLSQRVXAWRGLFTGLFAKTEYVEEIHGGGTPFCAMMGGGRR

SEQ ID NO: 11567 - protein, 407 aa, Capsella bursa-pastoris
YQGVYPVKGNQDRFVVEDIVKFGSSFRFGLEAGSKPEILLAMSCLCKGNPDAFLVCNGFKDAEYISLALLGRKLALNTVIVLEQEEELDLVIELSQKMNVRPVIGLRAKLRTKHSGHFGSTSGEKGKFGLTTTQIVRVVRKLSQSGMLDRLQLLHFHIGSQIPSTSLLSDGVAEAAQLYCELVRLGAHMKVIDIGGGLGIDYDGSKSGESDLSVAYSLEEYAEAVVASVRFVCDRSSVKHPVICSESGRAIVSHHSVLIFEAVSADKPMVHQATPDDIQFLLEGDEEARANYEDLYAAVMRGDHESCLLYVDQLKQRCVEGFKEGVLSIEQLASVDGLCEWVLKAIGASDPVHTYNINLSVFTSIPDLWGIDQLFPIVPIHKLDQRPGTRAILSDLTCDSDGKINKF

SEQ ID NO: 11568 - protein, 303 aa, Zea mays
YFPAPRIASAVLVCWPRFRSIPDPPSGRASTDFIIHSPAEPICFVCRSIRRSCEFNPRVSMSSYSPPPPPPRDQSMDTEAPNAPITRERRLNPDLQEQLPKPYLARALEAVDPSHPQGTKGRDPRGMSVLQQHAAFFDRNGDGVIYPWETFQGLRAIGCGLTVSFAFSILINLFLSYPTQPGWLPSPLLSIRIDNIHKGKHGSDSETYDTEGRFDPSKFDAIFSKYGRTHPNAITRDELSSMLQGNRNTYDFLGWLAAAGEWLLLYSLAKDKDGLLQRETVRGLFDGSLFERLEDDNNKKKSS

SEQ ID NO: 11569 - protein, 303 aa, Brassica napus
  misc_feature (202)..(202): Xaa can be any naturally occurring amino acid
MVFVKPSKSNAYFKRYQVKFRRRRDGKTDYRARIRLINQDKNKYNTPKYRFVVRFTNKDIVAQIVSASIAGDIVKASAYAHELPQYGLTVGLTNYAAAYCTGLLLARRVLKMLEMDEEYEGNLEATGEDFSVEPTESRRPFRALLDVGLIRTTTGNRVFGALKGALDGGLDIPHSDKRFAGFNKENKQLDAEIHRNYIYGGXHVSNYMKMLNEDEPEKFQTHFSQYLKKGVDAESMEELYKKVHAAIRADPNPKKTEKPAPKTHKRYNLKKLTYEERKTKLIERVKALNGAAGGDDEDEDAQE

SEQ ID NO: 11570 - protein, 141 aa, Zea mays
PLQAGDMVEGAYPVLERNGKECAPGAVLRLSVQYVPVARLTMYHHGVTPGPDFAGVPRTYFPLRRGGKVTLYQDAHVPDGTLPEVRLGNGDCYRHGQCWRDVYDAICQARRLIYITGWSVFHTIHWVSVSLTALLGSMIKR

SEQ ID NO: 11571 - protein, 105 aa, Zea mays
MEHGSLTDSTSSTFSIMYEDHTLANSARFVLNQELCSSKPPTNNCYRMMATKDDAQRMKQAAKYPRVAFCGYTIPHPSEKKVNIRLQTTGDAAKDVLKDALQNLM

SEQ ID NO: 11572 - protein, 52 aa, Glycine max
MGSFLEILCAVLIPPVGVFLRFGCGLEFWLSLLLTFFGFIPGMVYAIWVLTK

SEQ ID NO: 11573 - protein, 145 aa, Triticum aestivum
  misc_feature (90)..(90): Xaa can be any naturally occurring amino acid
  misc_feature (100)..(100): Xaa can be any naturally occurring amino acid
MAPAVMASSATTVAPFQGLKSTAGLPVSRRSGSAGLSSVSNGGRIRCMQVWPIEGIKKFETLSYLPPLSTEALLKQVDYLIRSKWVPCLXFNKVGFVFRXEHNNSPRATKNSILDKCGKLPNVRGATERKRKAQTKGWKAKKRYP

SEQ ID NO: 11574 - protein, 308 aa, Hyoscyamus niger
MEEQGNNESAYISSILPGWFSEISPLWPGEAHSLKVEKILFQGKSDYQNVVVFQSSTYGKVLVLDGVIQLTERDECAYQEMITHLPLCSIPNPKKVLVIGGGDGGVLREVSRHSSVEQIDICEIDKMVIDVSKQFFPNVAIGYEDPRVKLHVGDGVAFLKNVPEGTYDAVIVDSSDPIGPAQELFEKPFFESVARALCPGGVVCTQAESIWLHMHIIEDIVSNCRQIFKGSVNYAWTTVPTYPSGVIGFMLCSTEGPAVDFKNPINPIDADDSHTKTRGPLKFYNSEIHSASFCLPSFAKRVIESNAK

SEQ ID NO: 11575 - protein, 223 aa, Thermus thermophilus HB27
MELYLDTASLEEIREIAAWGVLSGVTTNPTLVAKVFAAKGEALTEEAFAAHLRAICETVGGPVSAEVTALEAEAMVAEGRRLAAIHPQIVVKLPTTEEGLKACKRLSAEGIRVNMTLIFSANQALLAARAGASYVSPFLGRVDDISWDGGELLREIVEMIQVQDLPVKVIAASIRHPRHVTEAALLGADIATMPHAVFKQLLKHPLTDIGLKRFLEDWEKVKP

SEQ ID NO: 11576 - protein, 72 aa, Brassica napus
  misc_feature (52)..(52): Xaa can be any naturally occurring amino acid
  misc_feature (65)..(65): Xaa can be any naturally occurring amino acid
SDFTAFTKDQERLISMADDAGVDYLEGQLFMSNGVVYTSFFSQSNQSKIADXVKSHGIIYVLEVXKVYDDPT

SEQ ID NO: 11577 - protein, 165 aa, Triticum aestivum
MYSLRLATSGSTALGFTLGRFGGKTGGGAAAGGLAAPAAAAHVGRRSVSATSNSAAPVPGDQGVGMDPGKQQQQHKPHAPAGEQQGEDVHKTTTAHGDVMTHSFGEGYSTRSDEEGFGGVYGQNDPVLNPGTEVHPDHPDYDKSQGSEVKEKEKARHLKDDKHAT

SEQ ID NO: 11578 - protein, 438 aa, Treponema denticola ATCC 35405
MKKTDFSISTLGECKIQSPIMLSETHGDLIANYVTDNEFIRYNLDASLGETGEPLTHADIIEKAGPRQKIYFSPNYVHAAIATCGGLCPGINDVIRAIVRCLWTRYGVRRISGIKFGYKGFISEYGFSPVPLTPEAVNGIHKTGGSFLGTSRGGGTRVTEIVDGIEQMNINMVFFIGGDGTQKGALEVSREIERRKLKISVIGIPKTIDNDLSFIQKSFGFDTAIAKATESVAAANMEASSQINGIGLVKLMGRESGFIATHTAIACHEAHFVLIPEVRFELGGENGFLKLLEKKLIENGYALIVAAEGAGQHLMNIEEETDASGNKKLADIGLFLKKEITEYFDKIGMHINLKYIDPSYQIRSSIAAPIDSVYCERLGNNAVHAAMAGKTRTLIGLVNNKFVHLPIEQVVSERKYVNPESSLWRDALDATGQPTTMI

SEQ ID NO: 11579 - protein, 170 aa, Zea mays
MAPTVMMASSATAVAPFQGLKSAASLPVARRSSRSLGNVSNGGRIRCMQVWPAYGNKKFETLSYLPPLSTDDLLKQVDYLLRNGWIPCLEFSKVGFVYRENSTSPCYYDGRYWTMWKLPMFGCNDATQVYKELQEAIKSYPDAFHRVIGFDNIKQTQCVSFIAYKPPGSD

SEQ ID NO: 11580 - protein, 511 aa, Gossypium hirsutum
MMAVLFVYLGFMVFGIIVLRFLYRFIDNNGLPRNWPFVGMIPTLLLNIHRPHDKVAQVLRRSNGTFFYRGLWFTNTSFLATSDPENVRYILSSNSSVYLKGPEWLKQFDIFGEALFNSDGEAWKCHRRVFHAFLNHPQYRQSLSKVLHQRIEEALVKVLEYVSGREMVVNLQDLLAGHAFDIGCITGVGFDPGLLSIEFPENRFQKAMSDTLEAAFYRYVVPDSLWKLQSWPQIGKGKKRSDAWKALDDLLTQFISTQRHKSTKSVASSGSNEEHDFNFLNCYLTGHEITGPTPKESLIRDNLIHFLFASDGTYSLTLTWFFYLISKAPVVENKIREEIKRHLSMKQVEGSLQIPSNYDELSKLTYLHAALCETLRLYPPIPFDFRTCTKQEYLPSGHRVDQNTRIIIGIHAMGRMESLWGEDCYAFKPERWIGEDGKIKRESPTKFSAFLAGPRICPGKEVSFLLMKATATAIIHNYNVHVVEGQNIGPKNSVVYQMKKGLMVRIKKRWS

SEQ ID NO: 11581 - protein, 316 aa, Coffea arabica
MADAVNSNSKEEAAQLPDGVSSVIPGWFSEISPMWPGEAHSLKVEKILFQGKSDYQNVMVFQSSTYGKVLVLDGVIQLTERDECAYQEMIAHLPLCSIPSPKKVLVIGGGDGGVLREVARHLSVEQIDICEIDKMVVDVSKQFFPDVAVGFEDPRVVLHIGDGVAFLKAVPEGTYDAIIVDSSDPIGPAQELFEKPFFESVAKALRPGGVVCTQAESIWLHMHIIEDIVANCRQIFKGSVNYAWTTVPTYPSGVIGFMLCSTEGPPVDFKHPINPIDANDGRSKTMKPLKFYNSEIHSAAFCLPSFAKKVIDSKAN

SEQ ID NO: 11582 - protein, 314 aa, Nicotiana sylvestris
MEAANHNNNGCTNESPYISSVLPGWFSEISPLWPGEAHSLKVEKILFQGKSDYQNVMVFQSSTYGKVLVLDGVIQLTERDECAYQEMIAHLPLCSIPNPKKVLVIGGGDGGVLREVSRHSSVEQIDICEIDKMVVEVSKQFFPDVAVGYEDPRVNLHIGDGVAFLKNVAAGTYDAVIVDSSDPIGPAQELFEKPFFESIARALRPGGVVSTQAESIWLHMHIIEEIVANCRQIFKGSVNYAWTTVPTYPSGMIGFMLCSTEGPAVDFKNPINPIDDDASHNKTLGPMKFYNSELHKASFCLPSFAKRVIESKGK

SEQ ID NO: 11583 - protein, 313 aa, Psychrobacter sp. 273-4
MSALQQLRTMTTIVADTGDLAAIERLKPIDATTNPSLITKALIHPDNEAVLSETMSRHRNDIDAVIDELTIQIGCNILSLIEGRVSTEVDARLSYDTQATIDKALAFMEAYQKSGIDSERVLIKMAATWQGIEAARYLETQGIHCNLTLLFGQHQAIACADAGVTLISPFVGRILDWQKRQQNRQNIPVSDDMGVQSVKLIYQYYKQHGYKTQVMGASFRSTEQILALAGCDLLTIAPNLIDELAAMDIEVTRQLSESMSMDMTDMTRVSLSAEEFSHAYQQDTITQDLLPKGIDGFISARDELAHMLASMRS

SEQ ID NO: 11584 - protein, 249 aa, Triticum aestivum
  misc_feature (177)..(177): Xaa can be any naturally occurring amino acid
  misc_feature (194)..(194): Xaa can be any naturally occurring amino acid
  misc_feature (206)..(206): Xaa can be any naturally occurring amino acid
  misc_feature (223)..(223): Xaa can be any naturally occurring amino acid
  misc_feature (226)..(226): Xaa can be any naturally occurring amino acid
  misc_feature (237)..(237): Xaa can be any naturally occurring amino acid
MKTFLIFALLAVAATSAIAQIENSHIPGLEKPSQQQPLPLQQTLSHHQQQQPVQQQPQPFPQQQPCSQQQQPPLSQQQQPFPQQPQQPFPQTQQPQQPFPQQPQQPFPQTQQPQQPFPQLQQPQQPFPQPQQQLPQPQQPQQSFPQQQRPFIQPSLQQQLNPCKNILLQQCKPASLXVSSLWSIIWPQSDCQVXMRQQCCQQLAQXPQQSNSQASIRLDSIIXQQXQQQQQQQGCNXANGGARTIPKVL

SEQ ID NO: 11585 - protein, 219 aa, Streptococcus agalactiae
AIKQQTIFDIDNAKTEVEIDNLVHDAFSKMNATVAKFQKGLETNTPETPDTPKIPELPQAPDTPQAPDTPHVPESPKAPEAPRVPESPKTPEAPHVPESPKAPEAPRVPESPKTPEAPHVPESPKAPEAPRVPESPKTPEAPHVPEAPKTPEAPKIPEPPKTPDVPKLPDAPKLPDGLNKVGQAVFTSTDGNTKVTVVFDKPTDADKLHLKEVTTKELA

SEQ ID NO: 11586 - protein, 219 aa, Streptococcus agalactiae
AIKQQTIFDIDNAKTEVEIDNLVHDAFSKMNATVAKFQKGLETNTPETPDTPKIPELPQAPDTPQAPDTPHVPESPKAPEAPRVPESPKTPEAPHVPESPKAPEAPRVPESPKTPEAPHVPESPKTPEAPKIPEPPKTPDVPKLPDVPKLPDVPKLPDVPKLPDVPKLPDAPKLPDGLNKVGQAVFTSTDGNTKVTVVFDKPTDADKLHLKEVTTKELA

SEQ ID NO: 11587 - protein, 356 aa, Magnaporthe grisea 70-15
MSRANPPSNSSGSRKISFNVSEQYDIQDVVGEGAYGVVCSAIHKPSGQKVAIKKITPFDHSMFCLRTLREMKLLRYFNHENIISILDIQKPRSYETFNEVYLIQELMETDMHRVIRTQDLSDDHCQYFIYQTLRALKAMHSANVLHRDLKPSNLLLNANCDLKVCDFGLARSAASQEDNSGFMTEYVATRWYRAPEIMLTFKEYTKAIDVWSVGCILAEMLSGKPLFPGKDYHHQLTLILDVLGTPTMEDYYGIKSRRAREYIRSLPFKKKVPFRTLFPKTSDLALDLLEKLLAFNPVKRITVEEALKHPYLEPYHDPDDEPTAPPIPEEFFDFDKHKDNLSKEQLKQFIYQEIMR

SEQ ID NO: 11588 - protein, 237 aa, Streptococcus agalactiae
AIKQQTIFDIDNAKTEVEIDNLVHDAFSKMNATVAKFQKGLETNTPETPDTPKIPELPQAPDTPQAPDTPHVPESPKAPEAPRVPESPKTPEAPHVPESPKAPEAPRVPESPKTPEAPHVPESPKTPEAPHVPESPKAPEAPRVPESPKTPEAPHVPESPKTPEAPKIPEPPKTPDVPKLPDVPKLPDAPKLPDGLNKVGQAVFTSTDGNTKVTVVFDKPTDADKLHLKEVTTKELA

SEQ ID NO: 11589 - protein, 181 aa, Xanthomonas campestris pv. campestris str. ATCC 33913
MSQSIHDIPVTDINGGATSLAAHRGKVLLVVNVASKCGLTPQYEGLEALYRDKQAQGLEVLGFPANDFNGQEPGSEAEIAQFCQLTYDVTFPLFSKIAVTGAEIHPLYQALTSAQPQATGDGPMREKLAGYGIAANPAPGVLWNFEKFLIGRDGQVIERFAPDVAADDVRLRQAVDAALAH

SEQ ID NO: 11590 - protein, 120 aa, Gossypium hirsutum
MASSMSLKLACVVVLCMVVGAPLAQGAVTCGQVTNSLAPCINYLRGSGAGAVPPGCCSGIKSLNSAAQTTPDRQAACRCIKSAAAGITGINFGLASGLPGKCGVNIPYKISPSTDCNSVK

SEQ ID NO: 11591 - protein, 249 aa, Streptococcus agalactiae
AIKQQTIFDIDNAKTEVEIDNLVHDAFSKMNATVAKFQKGLETNTPETPDTPKIPELPQAPDTPQAPDTPHVPESPKAPEAPRVPESPKAPEAPRVPESPKTPEAPHVPESPKAPEAPRVPESPKAPEAPRVPESPKTPEAPHVPESPKAPEAPRVPESPKTPEAPHVPESPKTPEAPKIPEPPKTPDVPKLPDVPKLPDAPKLPDGLNKVGQAVFTSTDGNTKVTVVFDKPTDADKLHLKEVTTKELA

SEQ ID NO: 11592 - protein, 193 aa, Nicotiana tabacum
MAFAGTTQKCMACDKTVYLVDKLTADNRIYHKACFRCHHCKATLKLGNSNSFEGVLYCRPHLIGLFKQTGSLDKSFEGTPKIVRPQKPIDSEKPQVAKVTSMFGGTREKCFGCKKTVYPTEKVSVNGTPYHKSCFKCSHGGCVISPSNYIAHEGRLYCKHHHIQLIKEKGNLSKLEGDHEMNSTTTTEVTAES

SEQ ID NO: 11593 - protein, 202 aa, Triticum aestivum
MLLPTRRLPAAPSRPSVHPYISPARPSLRFRPQYGRAATARATSATPPVFGDTLLGLYEKERLGLSRYADEESREDVFWETLDADLQYWTRSLRPGQWYPGHIAKTEKELKGQLKLMDVAIEVRDARIPLATTHPKMDSWLGNRRRIIVMNREDMVSADDRNAWATYFSSQGIKVIYSNGQLGMGTMKLGRMAKSAASRGIY

SEQ ID NO: 11594 - protein, 1182 aa, Cryptococcus neoformans var. grubii
MFVTRPPSSSVDHRGSLLDGHTNHTNTPGSSRDDVPSSDSTSTAFHKFKNSSRFSPHYLNIPPGLAFKSYLEKWGPEQVIGFLAIHGCEHHSGIFIKNSIDGKLLLDLDMGILTSLGITKVGERIRLMAGIKCLRQRVAHEAEKHNIPSAHLCNGSLEMDRVKVIIHPKLSASLYVHRHGPFDSGPITARRCPLTPSSSADPEGDPSPMQRSQEVMKHSFITRSSRRQVIPPLPPGQIHNHGIDNSPMPSLRHIPLRSGVSYSDIDVKGMPPLVTQSTNSVFNHTFAVTGSHDTTSCLGGHLRRPDYFRSTNDTFQTCTKRGDNTISELPQRNQESSPSMWKQSGVICEDKAMRNGSLFAPTSHKPFAISITGDNVMEYPHNLPIKNGLPLRSFQSPDKSADDDRLNINPSAPSLDDLRRQLVKFVNAEDGTTRTVNVMKTTSGVEVLERALRKFGKTGTGRALLLDDESHNGGKHEGPLCIDGWGVFAENLQGEEMGPMSEEDLLDICASLRNGAAMQRDALILRQTSKSQKRKDMRFYLGSMPVLPTPVNLPISFSSSHSGQFEQNSALQYTAQHQPLRSKNRSRASMMSIMSGLGVSHPDIKQPTHDSLQSPASVTMPSSKKKSMYNFFGHRPPSELISSHLTDYFPSAKKRDVAKARGSMLRLNIAHSAERNPRSVENLGMIEADDVPFSSTEQSLTEQRDHYFDSSTCQPADTSSPGHVDHNITDPAGNSEGNYRLPYDQKVLPTPITQELHSANSVNPILRTYPPNLPSTYLSARLTDLHRDSFLSQLQPLQHSSSLSSAQPFSSHRRTVDEITAEMQHRQTSLSCDRPTSTIDSDISGPPCNSEISLDHTSEASGISESSSEYCDDHSSVSSEDSEDNSAAHTRAFTTKRNIKWIKGALIGAGSFGSVFLGMDAQSGLLMAVKQVELPRGIAKMEARRRDMLSALEREIELLKDLQHDNIVQYLDSSMDANHLNIFLEYVPGGSVAALLNNYGAFEEALAGNFVRQILTGLNYLHERDIVHRDIKGANILVDNKGGIKISDFGISKKVENSLLNGLHPNRPSLQGSVFWMAPEVVKQTSYTSKADIWSVGCLVVEMLTGTHPWARLTQMQAIFQIGSMGQPEIPSDISVHAADFLSRAFALDYRMRPSAASLLKHAFMVHDGNGGNDEPIQNTYA

SEQ ID NO: 11595 - protein, 249 aa, Streptococcus agalactiae
AIKQQTIFDIDNAKTEVEIDNLVHDAFSKMNATVAKFQKGLETNTPETPDTPKIPELPQAPDTPQAPDTPHVPESPKAPEAPRVPESPKTPDTPHVPESPKAPEAPRVPESPKTPDTPHVPESPKAPEAPRVPESPKTPEAPHVPESPKAPEAPRVPESPKTPEAPHVPESPKTPEAPKIPEPPKTPDVPKLPDVPKLPDAPKLPDGLNKVGQAVFTSTDGNTKVTVVFDKPTDADKLHLKEVTTKELA

SEQ ID NO: 11596 - protein, 457 aa, Magnaporthe grisea 70-15
MGSPSPGTATSPPEDGDTADDYVNPLDQSPRWALATRAYAIRSGASLGFGISNAWAPPELAPVKVIWLDALLGDWKAKRAIRVDVWEPPSQPNTDKPDFPSTSQSSASDLLALAAPNVVVKTPTDEIDDNASIKSGCSSALSSSGRSSSSKLGTPKRPRIYKVASNLSSRSSRSIASIRSRLSRSNTASGLSLDSIPKRPVVINFHGGGFVVGEGTDDSRWCSAVAKSLNAVVFSVSYRLAPGYPFPNAVEDCASAIVQICSQDMASQYAIDTSRVILSGFSAGGNLALASWVALQDPARWGYESVLPSPPLEMAGLALFYPLLDWTIARDTKRQRCERPDLTLPKGLTDLFDASYIYPPLQSSKRDDPRLSPGLMSDRMLQQLPPVHFCLCEYDMLLAEGLTFTERLKSHGRIVETRVVKGEKHAWDKPPLWAPKENAAVEYEAAIESLKTWVGLD

SEQ ID NO: 11597 - protein, 193 aa, Nicotiana tabacum
MAFAGTTQKCMACDKTVYLVDKFTADNRIYHKACFRCHHCKGTLKLGNYNSFEGVLYCRPHFDQLFKQTGSLDKSFEGTPKIVKPQKPIDSEKPQVAKVTSMFGGTREKCFGCKKTVYPTEKVSVNGTPYHKSCFKCSHGGCVISPSNYIAHEGRLYCKHHHIQLIKEKGNLSKLEGDHEMNSTTTTEVTAES

SEQ ID NO: 11598 - protein, 292 aa, Zea mays
MAIATESRGSEDRASAHANEEKRWVLSDFEVGKPLGRGKFGHVYLAREKRSNQIVALKVLFKSQLKQSQVEHQLRREVEIQSHLRHPNILRLYGYFYDQTRVYLILEYAAKGELYKELTRCKHFSERRSATYIASLARALIYLHGKHVIHRDIKPENLLVGAQGEIKIADFGWSVHTFNRRRTMCGTLDYLPPEMVEKTEHDYHVDIWSLGILCYEFLYGVPPFEAKEHSETYRRIVKVDLKFPLKPFVSPAAKDLISQMLVKNSAQRLPLHKVLEHPWIVQNADPSGVCRG

SEQ ID NO: 11599 - protein, 239 aa, Arabidopsis thaliana
MSLIEDCLRSYRFIAIDTEFPSTLRETTQHATDEERYMDMSFSVDRAKLIQLGLTLFDINGRIGGTWEINFSDFGVDDARNEKSIEFLRRNGLDLRKIREEGIRIEGFFSEMFWMLKKTRRNITWVTFHGSYDIAYLLKGFTGEALPVTSERFSKAVARVLGSVYDLKVMAGRCEGLSSRLGLETLAHEFGLNRVGTAHHAGSNNELTAMVFAKVLSPFPLFLRFGSLELRTIESEAIV

SEQ ID NO: 11600 - protein, 447 aa, Glycine max
  misc_feature (35)..(35): Xaa can be any naturally occurring amino acid
  misc_feature (272)..(272): Xaa can be any naturally occurring amino acid
SVIGYSVVILIMERYKILRELGDGSCGHVYKARDXEHYEIVAVKRLKRKFYFWEEYTNLREVMILRKMNHSNIIKLKEVVRENNELFFIFEYMDCNLYQLIKEREKPFSEEEIRCFMRQVLQGLSHMHKKGFFHRDLKPENMLVTNDVLKIADFGLAREVSSMPPYTQYVSTRWYRAPEVLLRAPCYTPAVDMWAVGAILAELFFDSLEYPGESEIDQLYKIYGILGMPDSTAFHHCYTPAVDMWAVGAILVVPPVKLSNIIPNASLEALDXITQLLHWDPSRRPDADQSLQHPFFHVDAWVPCPPSDPLELKLSSKRAKPNLELKLQDFGPDPDDCFLGLTLGVKPSVSNSDVVQNVSQGVRENVLFCSDFNDHSDQSVFWTLLSPDQNGIHNSAETSLSLSFSPVQHPPIGVPQSVGFSFQPLQPNILTSPFLALSSPFQRGHCL

SEQ ID NO: 11601 - protein, 407 aa, Arabidopsis arenosa
YQGVYPVKGNQDRFVVEDIVKFGSSFRFGLEAGSKPEILLAMSCLCKGSPDAFLVCNGFKDAEYISLALLGRKLALNTVIVLEQEEELDLVIELSQKMNVRPVIGLRAKLRTKHSGHFGSTSGEKGKFGLTTTQIVRVVRKLSQSGMLDCLQLLHFHIGSQIPSTSLLSDGVAEAAQLYCELVRLGAHMKVIDIGGGLGIDYDGSKSGESDLSVAYSLEEYAEAVVASVRFVCDRSSVKHPVICSESGRAIVSHHSVLIFEAVSADKPMVHQATPDDIQFLLEGNEEARANYEDLYAAVMRGDHESCLLYVDQLKQRCVEGFKEGVLSIEQLASVDGLCEWVLKAIGASDPVHTYNINLSVFTSIPDLWGIDQLFPIVPIHKLDQRPGARGILSDLTCDSDGKINKF

SEQ ID NO: 11602 - protein, 424 aa, Staphylococcus aureus subsp. aureus COL
MKLIKNGKVLQNGELQQADILIDGKVIKQIAPAIEPSNGVDIIDAKGHFVSPGFVDVHVHLREPGGEYKETIETGTKAAARGGFTTVCPMPNTRPVPDSVEHFEALQKLIDDNAQVRVLPYASITTRQLGKELVDFPALVKEGAFAFTDDGVGVQTASMMYEGMIEAAKVNKAIVAHCEDNSLIYGGAMHEGKRSKELGIPGIPNICESVQIARDVLLAEAAGCHYHVCHVSTKESVRVIRDAKRAGIHVTAEVTPHHLLLTEDDIPGNNAIYKMNPPLRSTEDREALLEGLLDGTIDCIATDHAPHARDEKAQPMEKAPFGIVGSETAFPLLYTHFVKNGDWTLQQLVDYLTIKPCETFNLEYGTLKENGYADLTIIDLDSEQEIKGEDFLSKADNTPFIGYKVYGNPILTMVEGEVKFEGDK

SEQ ID NO: 11603 - protein, 302 aa, Triticum aestivum
  misc_feature (252)..(252): Xaa can be any naturally occurring amino acid
LGGSRPRSALKLVGATLAEHTYLFLGAGEAGTGIAELIALEMSRQTKTPIDECRKKIWLVDSKGLIVSARKESLQHFKKPWAHEHEHVGNLLDAVNAIKPTVLIGTSGKGQTFTQEVVEAISSFNEMPIILALSNPTSQAECTAEQAYTWSKGRAVFATGSPFDPVQYNGKIHVPGQANNAYIFPGFGLGVVMSGAIRVHDDMLLAASEALAQQVTQENFDKGLIYPPFSNIRKISAHIAANVAAKAYELGXLASRRPRPKDLVKYAESCMYSPIYRNLQVNPAFIRLCTETVCPTTCLQNP

SEQ ID NO: 11604 - protein, 498 aa, Magnetospirillum magnetotacticum MS-1
MCGIAATIGLSDATAFTSLFGAIGHRGPDESGIRESGDIRIGMHRLAIVGRMGDSVPLIGADGLVLAFNGEIYNHQALRADFPDYPFAGQSDAEVLFPLLKRHGLGGLDRLRGMFAFVLTDMESGEFLAVRDPFGIKPLYYAETGGGFAFASEMKAFAAMGITPRFLPPGHLLTRHGLRRWYRVPGRFRLSRRPNLRALLERAVASHLPPEGPCGVFLSGGLDSSLVAALAARSRPDMVAYSVVLPGSPDEEPAALMAAHLGIRHKVLRATADDIRAALPEVIGALESFNPIMVRNAVPLYLLSKMAAKDCKVVLGGDGADELFAGYDYLSRVPRRFWPQAMDYGFSNLHRTELQRVDRMTMAHGLELRVPFLDREVAEAAVNLPLSAKFGIKDGTPMPKLALREAAEGLLPPSIQWRRKLPLADGSGFGGLDLGAGRDKADPVPGWDVGDEDAVAFFPLWRVRFPLARPDSAIWRDCGRYHDFEECHGRPLLELFRR

SEQ ID NO: 11605 - protein, 487 aa, Chlamydomonas reinhardtii
MPLAELWRLTKLVPLACTVLLLSVRALAVDSGGLNDSADNSSRSLLQESGQASGTSQPYTYSSSDFVLLNGFLIFFMQIGFVSAESGQGRAKNVRNILLKNSVNIMLCAICWWAVGYAFAYGNSGGGFIGTSRFFSDGESFGSKPWFFTWTFCLSCVTIASGCLAERTHLFVYPVYTAVVSIAVHPVIAHWVWAPDSWLNSMTGSPCRFLDFAGGAVVHTVGGLTGLIGAMLCGPRLGRFEDGVGKDIPGHDVSSVSLGSLMLWFGWYGFNCGSTYIYMAQGGSEASAAVSRVALNMTLCASVAGMTSLVVSSIQTGTFDLAVCCNGLMAGLSASTSNVGFLTPWAACITGALAGLLYVGISRLLVRMGVDDPLDSSAIHCGSGILGVLVSGFLARPSYVMQMVGCNCGGVVYATNGGMQLGMQLLGLSCSMVWTAMWALLTFGILKKLQLLRVDQQTELAGIDNMEHGGPAYPEFLQRVQSTRPGY

SEQ ID NO: 11606 - protein, 407 aa, Stanleya pinnata
YQGVYPVKGNQDRFVVEDIVRFGSPFRFGLEAGSKPEILLAMSCLCKGNPDAFLVCNGFKDAEYISLALLGRKLALNTVIVLEQEEELDLVIDLSQKMNVRPVIGLRAKLRTKHSGHFGSTSGEKGKFGLTTTQIVRVMRKLSQSGMLDCLQLLHFHIGSQIPSTSLLSDGVAEAAQLYCELVRLGAHMKVIDIGGGLGIDYDGSKSGESDLSVAYTLEEYAEAVVASVRFVCDRRSVKHPVICSESGRAIVSHHSVLIFEAVSAVKPMAHQANPDDIQFLLEGNEEARANYEDLYAAVMRGDHESCLLYVDQLKQRCVEGFKDGVLSIEQLASVDGLCEWVLKAIGASDPVHTYNINLSVFTSIPDLWGIEQLFPIVPIHKLDQRPGTRGILSDLTCDSDGKIDKF

SEQ ID NO: 11607 - protein, 472 aa, Escherichia coli O157:H7
MTTHLVWFRQDLRLHDNLALAAACRNSSARLLALYIATPRQWAAHNMSPRQAELINAQLNGLQIALAEKGIPLLFREVDDFAASVEIVKQVCAENSVTHLFYNYQYEVNERARDVQVERTLRNVVCEGFDDSVILPPGAVMTGNHEMYKVFTPFKNAWLKRLREGMPECVAAPKVRSSGSIKPAPSITLNYPRQSFDTAHFPVEEKAAIAQLRQFCQNGAGEYEQQRDFPAVEGTSRLSASLATGGLSPRQCLHRLLAEQPQALDGGAGSVWLNELIWREFYRHLMTYYPSLCKHCPFIAWTDRVQWQSNPAHLQAWQEGKTGYPIVDAAMRQLNSTGWMHNRLRMITASFLVKDLLIDWREGERYFMSQLIDGDLAANNGGWQWAASTGTDAAPYFRIFNPTTQGEKFDREGEFIRQWLPELRNVPGKSVHEPWKWAEKAGVKLDYPQPIVEHKEARVQTLAAYEAARKGK

SEQ ID NO: 11608 - protein, 161 aa, Thermoplasma acidophilum
MNRSYSDQAEVDCMEVKVEGFGKGSQIPVEYTCDGEDRMPAIAVEGFPSGTKSLALIVDDPDAPSGLFTHCIIYNIPTSVKVIDSSILKQTGVLSGVNDFGNKGYGGPCPPPGKPHRYYFKVLALDTTLTKAGMKRKDFDNAVRGHVLGQAEYMGTYLRKH

SEQ ID NO: 11609 - protein, 143 aa, Nitrosomonas europaea ATCC 19718
MCHTCDGKDFSPELAWTGVPENTKSLVLIVDDPDAPDPQAPKMTWVHWILYNIPPATRKLPERVTVAELPSGTLEGVNDWERTGYGGPCPPIGTHRYFHKLYALDTLLPDLNQPTKAILEKAMQGHIIARTELIGLYHRSDNV

SEQ ID NO: 11610 - protein, 416 aa, Escherichia coli
MESKVVVPAQGKKITLQNGKLNVPENPIIPYIEGDGIGVDVTPAMLKVVDAAVEKAYKGERKISWMEIYTGEKSTQVYGQDVWLPAETLDLIREYRVAIKGPLTTPVGGGIRELNVALRQELDLYICLRPVRYYQGTPSPVKHPELTDMVIFRENSEDIYAGIEWKADSADAEKVIKFLREEMGVKKIRFPEHCGIGIKPCSEEGTKRLVRAAIEYAIANDRDSVTLVHKGNIMKFTEGAFKDWGYQLAREEFGGELIDGGPWLKVKNPNTGKEIVIKDVIADAFLQQILLRPAEYDVIACMNLNGDYISDALAAQVGGIGIAPGANIGDECALFEATHGTAPKYAGQDKVNPGSIILSAEMMLRHMGWTEAADLIVKGMEGAINAKTVTYDFERLMDGAKLLKCSEFGDAIIENM

SEQ ID NO: 11611 - protein, 238 aa, Oryza sativa (japonica cultivar-group)
MPSRTAPFISRLRLLRTAAALSPFSSSAPPRHSPRILRAIPVGAPHPPRVSAAVSPLVRPVAAGFALFSMATAASSAASVHDFTVKDASGKDVDLSTFKGKVLLIVNVASQCGLTNSNYTELSQLYEKYKDQGFEILAFPCNQFGGQEPGTNEEIVQFACTRFKAEYPIFDKVDVNGDNTAPIYKFLKSSKGGLFGDNIKWNFSKFLVDKEGRVVERYAPTTSPLSMEKDIKKLLGSS

SEQ ID NO: 11612 - protein, 426 aa, Aspergillus nidulans FGSC A4
MLKNVLRRGALRLVRQRASYATSALTPQQKQIVKATIPALEQHGVTITTLFYKEMLERHPELNNIFNSSHQATGVQPAALAHAVWAYASNIDHPEALATAVSRIGHKHASLGVRSEHYPIVGEHLLRAIKKVLGDAVTPPVADAWTAAYQQLADIFISFEDDLYKQATQTPGGWTGWRKFVIADKVHESEEIISFQLVPQDNGRLPTYKPGQFVSVRCFVPELGVYQPRQYSLSDIPNQRYFQISVKKEFASGARPAGRISNVLHESLPKGSEVEISMPFGDFVLDTNATTPVVLMSGGVGLTPMMSMLKTVTNNSKSRPAVFVHAVRNGRVHAMKETLANIMTDNPQVKRAIFYEQVEEGDKQGVDYDYVGRVDVSKIKDLVFLPDADYYICGPSPFMKAQSEALETLGVRPDRIHMEVFGSPTP

SEQ ID NO: 11613 - protein, 127 aa, Streptomyces avermitilis MA-4680
MPTGKVKWFNSEKGFGFLSRDDGGDVFVHSSVLPAGVEALKPGQRVEFGVVAGQRGDQALSVVLLDPTPSVAAAQRRKPDELASIVQDLTTLLENITPMLEKGRYPEKTSGKKIAGLLRAVADQLDV

SEQ ID NO: 11614 - protein, 425 aa, Vibrio vulnificus CMCP6
MSDDNSQQMTPEEVLRQQALDYHALPTAGKIAVALTKPAETAKDLALAYSPGVAEPVREIAQNPDNVYKYTSKGNMVAVISNGTAILGLGNLGPLASKPVMEGKALLFKRFAGLDSIDIEVKHRTIDEFVDTVANIADTFGGINLEDIKAPDCFEIEKRLIERCDVPVFHDDQHGTAIVTAAGMLNAIELQGKKLNECIIVCLGAGAAAVACMELLIKCGAMREKIYMLDRKGVIHTRRDDLNEYKQLFANNTDKRTLEDVISGADLFLGVSGPNLMPAEALKLMADKPVVFACSNPDPEIKPELAHEVRSDLIMGTGRSDYPNQVNNVLCFPFIFRGALDVRASEINDEMKLAAVEAIRQLAKEPVPEAVLKAAGVESLSFGPQYIIPKPMDSRLLPRVAKAVAQAAVDTGVARIPMPENYMAE

SEQ ID NO: 11615 - protein, 513 aa, Hordeum vulgare
MDGNNRGGGHSEVLKNYNLGKTLGLGTFGDVKVAERNVTGQRVAIKILNRRKMETMEMEEKGNREIKIMRLFIDFIHPHIIRVYEVIETPKDIFVVMEYCNNGELLDYIIENGRLQEDEARRIFQQILAGVEYCHRIMVVHRDLKPENLLLDSRYNVKLADFGLSNVMRDGHFLKTSCGSLNYAAPEIISSKLYAGPEVDVWSCGVVLYALLCGSVPFDDDNIPSLFRKIKGGTYILPSYLSDSARDLIPKLLNIDPMKRITFHEIRVHPWFKNHLPCYLAVPPPYKEQQAKMIDEDILREVVNLGYDKDHVCESLWNRLQNEETVAYYLLLDDRFRSTSGYLGADHQHLMDRSFNEFTLSESASPSTRNYLPGINDSQGGGLRPYYPVQRKWAIGLQSGAHPRDIMIEVLKALKELNVCWKKNGLYNMKCRWCPGFPQVSDMLLDSNHNFVDDSTIMDNGNADGRLPAVVKFEIQLYKTKDNKYLLDIQRVTGPQLLFLEFCGAFLTNLRVL

SEQ ID NO: 11616 - protein, 195 aa, Triticum aestivum
HASAHASAHAFADAWVQLCKHFQFDWPVNHTSLSPDGKLVVIVGDDPNGLLIDANSGKTLHSMKGHHDFSFASAWSPDGRTFATGNQDKTCRIWDARNLSKAVHVLKGNLGAIRSIRFTSDGQFLSMAEPADFVHIFDVKSDYNRRQELDFFGEISGMSFSPDTDALFVGVWDRTYGSLLQFGRLYNNWYHDSML

SEQ ID NO: 11617 - protein, 348 aa, Treponema denticola ATCC 35405
MSIKIRTAAVTGPHKVEILELNTPDLRSGEVLVKVHAVALCTLEQRIFRGEIPMPLPCTGGHEVSGEVVALGDGVNTKKWSAGDRVAVRLLYNCGECHYCHSGHNNLCERAQKKPVRENLLVGPGGLCDYIIVNTSALFPISDELSYEEACLTEPLACCVHSIERANLQLGEDVVVIGGGIMGQYHIMLAKCRGCRVILSEVDPERCKLGKQLGADIVFNPLEHDPVTFIQSLTNGRGADAVFNTTPIPGVVPQAIAMTGKCGRMIQYSSMHPDSPTPVSPQMLHGSEIVLTGAISPDERNFYTANRLLSTGIINCKPLIAKKFPFEEAQKAFEAAIVPGTFRMIITD

SEQ ID NO: 11618 - protein, 296 aa, Spiroplasma kunkelii
MTTNIHWFPGHMAKAIKQIDEQSKLIDLIIEIVDSRIPFSSSNPLVDNLRGLKPKLIILNKKDLADPVAIKAWFKYYQSQQIAVLPLDSKHGNITKLIIEKIYFVLAGKIERNQNRGIKSPKLKVMVIGIPNVGKSTFINALIKRNSTRVGNKPGVTKGQQWLKLNHQIDLVDTPGILWPKINDPQVAINLAFIRSIKEDILPKEEICLAAIKWMHKYYFSLLVKQYHLLPSDNFDVTDEQKLFELLLVMQKNRFHKVDEDNVNNIVTDFLNNLWNNKFGLMSFEFPPGKRTINYE

SEQ ID NO: 11619 - protein, 304 aa, Candida parapsilosis
MSLAGKEFKLSNGNKIPAVAFGTGTKYFKRGHNDLDKQLIGTLELALRSGFRHIDGAEIYGTNKEIGIALKNVGLNRKDVFITDKYNSGNHTYDGKHSKHQNPYNALKADLEDLGLEYVDLYLIHFPYISEKSHGFDLVEAWRYLERAKNEGLARNIGVSNFTIENLKSILDANTDSIPVVNQIEFSAYLQDQTPGIVEYSQQQGILIEAYGPLGPITQGRPGPLDKVLSKLSEKYKRNEGQILLRWVLQRGILPITTTSKEERINDVLEIFDFELDKEDEDQITKVGKEKTLRQFSKEYSKYD

SEQ ID NO: 11620 - protein, 250 aa, Capsicum annuum
MGKSYPTVSAEYLKAVDKCKRKLRALIAEKNCAPIMLRLAWHSAGTYDVCSKTGGPFGTMRFRAEQAHGANNGIDIAIRLLEPIREQFPTLSYADFHQLAGVVAVEVTGGPDVPFHPGREDKPEPPVEGRLPDATKGSDHLRDVFVKQMGLSDKDIVALSGGHTLGRCHKERSGFEGPWTTNPLIFDNSYFKELLSGEKEGLLQLPSDKALLSDPAFRPLVEKYAADEDAFFADYAEAHLKLSELGFAEA

SEQ ID NO: 11621 - protein, 494 aa, Treponema denticola ATCC 35405
METLKYVKKEPYQLFIDGKYIPSENGSIVDVINPVNNLPFAKAYRGTKTDCEKAIAAARKAFDEGPYRKMSAKDRSKLLLKAAQILERRAEELAVIETLECGKNYSACRYWEVPMAIDSFEFFAGKARCLDGKVVPSEYGTLNYVTWNPCGVVGEILPWNGPFLMGCQKVNAILAAGNTVVIKPPSWGVLSMILMASIYEEAGFPSGVVNVVTGSGAEVGNCLVESELVDMVSMTGGVETGREIIAHSAKLVKDIALELGGKSPNIFFEDVDIEQAARFAVYGFTNHAGQICVSGTRILVQRRIYEPFIKAMVETAYKLKPGDGFDPSTTINTLISREHANTVWEYIEKGKKQNARLVCGGNPYSEPLLKKGNFIPPTIFADVTPEMEIFQNEIFGPVACITPFDTEEEAISLANATKYGLAGGVFTKDIKRAIRVADRINSGQIYINNYFSKGMIESPGTGWKESGIGIAGIHKYMISKTVFVETVDNVLLPI

SEQ ID NO: 11622 - protein, 307 aa, Candida parapsilosis
MTQSNLLPKTFRTKSGKEISIALGTGTKWKQAQTINDVSTELVDNILLGLKLGFRHIDTAEAYNTQKEVGEALKRTDVPREDIWVTTKYSPGWGSIKAYSKSPSDSIDKALAQLGVDYVDLFLIHSPFFTTEQTHGYTLEQAWEALVEAKKAGKVREIGISNAAIPHLEKLFAASPSPEYYPVVNQIEFHPFLQNQSKNIVRFCQEHGILVEAFSPLAPLARVETNALAETLKRLAEKYKKTEAQVLLRYTLQRGILPVTTSSKESRLKESLNLFDFELTDEEVNEINKIGDANPYRAFFHEQFKDL

SEQ ID NO: 11623 - protein, 117 aa, Triticum aestivum
MERRAARRSSAHHSRMQMPPAPVGQKQHQQTQTQRRGGSKSCQRTPPPPGCFTIQLLMVFLWVAASLAFLPLVLPPLPPPPLSLLLLPVCLLAVLAALAFVPLDAHSNVVGGGSSCL

SEQ ID NO: 11624 - protein, 404 aa, Escherichia coli
GKKITLQNGKLNVPENPIIPYIEGDGIGVDVTPAMLKVVDAAVEKAYKGERKISWMEIYTGEKSTQVYGQDVWLPAETLDLIREYRVAIKGPLTTPVGGGIRSLNVALRQELDLYICLRPVRYYQGTPSPVKHPELTDMVIFRENSEDIYAGIEWKADSADAEKVIKFLREEMGVKKIRFPEHCGIGIKPCSEEGTKRLVRAAIEYAIANDRDSVTLVHKGNIMKFTEGAFKDWGYQLAREEFGGELIDGGPWLKVKNPNTGKEIVIKDVIADAFLQQILLRPAEYDVIACMNLNGDYISDALAAQVGGIGIAPGANIGDECALFEATHGTAPKYAGQDKVNPGSIILSAEMMLRHMGWTEAADLIVKGMEGAINAKTVTYDFERLMDGAKLLKCSEFGDAIIE

SEQ ID NO: 11625 - protein, 377 aa, Cryptococcus neoformans var. grubii H99
MSFRAPNLIRSTVGRRAGQTLNLRSQVIRRRFATEGGPEITKPSAPRSSNTGYIFAGLGVAAVGAAYYFYGTGRTEHDSTNKADTVVREAVATVEAKTGLRRGKDEYQKVYNRIAETLDKEGYDDGSLAPVLLRLAWHASGTYSKADGTGGSNFATMRFKPEAEHSANNGLHVAREHMEKIKQEFPWISYGDLWTLGGVCAIQESGGPTIPWRPGRIDGYAAQVTPDGRLPDATQAQDHLRFIFNRMGFNDQEIVALSGAHAMGRCHPNRSGFDGPWTFSPVTFSNQYFALLRDEPWQWKKWTGPAQFEDKKTKTLMMLPTDMALVKDKSFKKYVDIYADNEEKFFSDFAKAFSKLIELGVPERQWAGEPWTMATSD

SEQ ID NO: 11626 - protein, 404 aa, Pseudomonas aeruginosa UCBPP-PA14
MGPDVVDVRGLTATGHFTFDPGFMSTASCESKITYIDGDKGVLLHRGYPIEQLAEKSDYLETCYLLLNGELPTAAQKEQFVGTIKNHTMVHEQLKTFFNGFRRDAHPMAVMCGVIGALSAFYHDSLDINNPKHREVSAHRLIAKMPTIAAMVYKYSKGEPMMYPRNDLNYAENFLHMMFNTPCETKPISPVLAKAMDRIFILHADHEQNASTSTVRLAGSSGANPFACIASGIAALWGPAHGGANEAVLRMLDEIGDVSNIDKFVEKAKDKNDPFKLMGFGHRVYKNFDPRAKVMKQTCDEVLQELGINDPQLELAMKLEEIARHDPYFVERNLYPNVDFYSGIILKAIGIPTSMFTVIFALARTVGWISHWQEMLSGPYKIGRPRQLYTGHTQRDFTALKDRG

SEQ ID NO: 11627 - protein, 421 aa, Bradyrhizobium japonicum USDA 110
MKTAKRSPIWHPFTQHALQRDMTKVVRGEGAYLYTEDGRRLIDAISSWWVVTHGHCHPCIVNAIREQAGKLNQVIFAGYTHDPAEQVATELLKVTSPALEHVFFSDSGSTSVEVALKMALGYWRNTGRERTKIVVMQHSYHGDTIGAMSVGSRGIFNAAYGALMFEVTSIPFPARDCEQRALDALENACRNEHPAAFIVEPLILGAGGMLMYSPSVLREMKRICEAFDVLFIADEVMTGWGRTGTLFACEQADVTPDIACYSKGLTAGALPLAVTLCRADIFDAHYSEDRTRTFFHSSSYTANPVACAAAKANLDLWQDQEYRWRLASLARMQEQALAPFRLDSRFANVRRTGTVTAVELNTRDAGYLADIGPRLLAFFQARDLLLRPLGNTIYVMPPYCVTAADLDEIYTAIRDAADLLM

SEQ ID NO: 11628 - protein, 286 aa, Pseudomonas aeruginosa PAO1
MSDYQETLYQGYGQRFSIDNMLHEVRTEHQHLVIFENARMGRVMALDGVIQTTEADEFIYHEMLTHVPILAHGAARRVLIIGGGDGGMLREVAKHKSVERITMVEIDGTVVDMCKEFLPNHSQGAFDDPRLNLVIDDGMRFVATTEERFDVIISDSTDPIGPGEVLFSENFYQACRRCLNEGGILVTQNGTPFMQLEEVRTTAARTDGLFADWHFYQAAVPTYIGGAMTFAWGSTHEGLRRLPLETLRQRFRDSGIATRYYNADIHLGAFALPQYVLQAIGKQDND

SEQ ID NO: 11629 - protein, 165 aa, Escherichia coli B
TANEIAALAFVNTVVATAAAILGWIFGEWALRGKPSLLGACSGAIAGLVGVTPACGYIGVGGALIVGVVAGLAGLWGVTMLKRLLRVDDPCDVFGVHGVCGIVGCIMTGIFAASSLGGVGFAEGVTMGHQLLVQLESIAITIVWSGVVAFIGYKLTDLTVGLRVP

SEQ ID NO: 11630 - protein, 322 aa, Xanthomonas campestris pv. campestris str. ATCC 33913
MTASPSKLAQLRDLSVVVADTGDYDAIKRLKPVDCTTNPTLVKKALDLPVYADLIERELAWGRAHGGEDRNSTINEVADRLTVGVGTMLSELVPGRVSTEVDADLAHDTQATIAKARKFIAMYAERGVSKDKILIKIAATWEGIEAARQLQQEGIDCNLTLIFNRSQALACAEAGVFLISPFVGRILDFFVAKGQTPASIDEDPGVVFVRGVYDEFKRRGSSTVVMGASFRSTAQIEALAGCDRLTISPDLLEKLDADHGDLPRKLSPLNADNAAITPINSDSFATDLAADDMATEKLASGIDTFAKDLEALRKTIADKLAG

SEQ ID NO: 11631 - protein, 407 aa, Thlaspi arvense
YQGVYPVKGNQDRFVVEDIVKFGSPFRFGLEAGSKPEILLAMSCLCKGNPDAFLVCNGFKDAEYISLALLGRKLALNTVIVLEQEEELDLVIDLSQKMNVRPVIGLRAKLRTKHSGHFGSTSGEKGKFGLTTTQIVRVMRKLSQSGMLDCLQLLHFHIGSQIPSTSLLSDGVAEAAQLYCELVRLGAHMKVIDIGGGLGIDYDGSKSGESDLSVAYTLEEYAEAVVASVRFVCDRRSVKHPVICSESGRAIVSHHSVLIFEAVSAVKPMAHHANPDDIQFLLEGNEEARANYEDLYAAVMRGDHESCLLYVDQLKQRCVEGFKDGVLSIEQLASVDGLCEWVLKAIGASDPVHTYNINLSVFTSIPDLWGIEQLFPIVPIHKLDQRPGARGILSDLTCDSDGKIDKF

SEQ ID NO: 11632 - protein, 443 aa, Zea mays
MEDAMAADGKSVLQGRYELGRVLGHGNFGRVHAARDLRTGRSVAVKVVAKDKLERAGMAEQIKREIAVMKMVSHPNIVELHEVMATRSKIYLALELVRGGELFSRIARAGRVREDVARCYFRQLVAAVDFCHGRGVFHRDLKLENLLLDEVGNLKVADFGLSALAGHARSDGLLHTACGTPSYVAPEVLGGKGYDGAKADLWSCGVILYVLLVGSLPFHEDNLMVMYRKMQRGEFLCPPWVSADARKLIGELLDPDPSTRITVARLVETPWYRKPLPVLPPLNLKEPTPDARRATSDKEEPEVLNAFHLISFSEGFDLSPLFDQGRGGGVGRSSAGGIRFVTREAASSVVSRLESLVTGRGANMRVTKSGSRGVRLEAVSRGRSGARLAVAAEIFSVAPSVLLVDVKKDGGDTMEYRSFCCEELRPALKDIVWASSQDTPGAA

SEQ ID NO: 11633 - protein, 423 aa, Chlamydophila pneumoniae TW-183
MDKQSSGNSGCIWHPFTQSALDSTPIKIVRGEGAYLYAESGTRYLDAISSWWCNLHGHGHPYITKKLCEQAQKLEHVIFANFTHEPALELVSKLAPLLPEGLERFFFSDNGSTSIEIAMKIAVQYYYNQNKAKSHFVGLSNAYHGDTFGAMSIAGTSPTTVPFHDLFLPSSTIAAPYYGKEELAIAQAKTVFSESNIAAFIYEPLLQGAGGMLMYNPEGLKEILKLAKHYGVLCIADEILTGFGRTGPLFASEFTDIPPDIICLSKGLTGGYLPLALTVTTKEIHDAFVSQDRMKALLHGHTFTGNPLGCSAALASLDLTLSPECLQQRQMIERCHQEFQEAHGSLWQRCEVLGTVLALDYPAEATGYFSQYRDHLNRFFLERGVLLRPLGNTLYVLPPYCIQEEDLRIIYSHLQDALCLQPQ

SEQ ID NO: 11634 - protein, 407 aa, Thellungiella salsuginea
YQGVYPVKGNQDRFVVEDIVKFGSPFRFGLEAGSKPEILLAMSCLCKGNPDAFLVCNGFKDAEYISLALLGRKLALNTVIVLEQEEELDLVIDLSQKMNVRPVIGLRAKLRTKHSGHFGSTSGEKGKFGLTTTQIVRVMRKLSQSGMLDCLQLLHFHIGSQIPSTSLLSDGVAEAAQLYCELVRLGAHMKVIDIGGGLGIDYDGSKSGESDLSVAYTLEEYAEAVVASVRFVCDRRSVKHPVICSESGRAIVSHHSVLIFEAVSAVKPMAHHANPDDIQFLLEGNEEARANYEDLYAAVMRGDHESCLLYVDQLKQRCVEGFKDGVLSIEQLASVDGLCEWVLKAIGASDPVHTYNINLSVFTSIPDLWGIEQLFPIVPIHKLDQRPGARGILSDLTCDSDGKINKF

SEQ ID NO: 11635 - protein, 154 aa, Brassica napus
ESAQSQFWVVDAQGLITEGRDNIDPEALPFARKTKEMERQGLKEGASLVEVVREVKPDVLLGLSAVGGLFSKEVLEAMKGSTSTRPAIFAMSNPTKNAECTAQEAFSILGDNIIFASGSPFKNVDLGNGHVGHCNQGNNMYLFPGIGLGVLLSG

SEQ ID NO: 11636 - protein, 261 aa, Triticum aestivum
GRDVSSHGEGLPHVSEDYLKAVDKAKRKLRGLIAEKNCAPLMLRLAWHSAGTFDVATKTGGPFGTMKCPAELAHGANAGLDIAVRLLEPIKEQFPILSYADFYQLAGVVAVEVTGGPEVPFHPGRQDKPEPPPEGRLPDATQGSDHLRQVFSTQMGLSDQDIVALSGGHTLGRCHKERSGFEGAWTANPLIFDNSYFTELLCGEKEGLLQLPTDKTLLTDPAFRPLVDKYAADEDAFFADYAEAHLKLSELGFGEAVEGCC

SEQ ID NO: 11637 - protein, 407 aa, Nasturtium officinale
YQGVYPVKGNQDRFVVEDIVRFGSPFRFGLEAGSKPEILLAMSCLCKGSPDAFLVCNGFKDAEYISLALLGRKLALNTVIVLEQEEELDLVIDLSQKMNVRPVIGLRAKLRTKHSGHFGSTSGEKGKFGLTTTQIVRVVSKLSQSGMLDCLQLLHFHIGSQIPSTSLLSDGVAEAAQLYCELVRLGAHMKVIDIGGGLGIDYDGSKSGESDLSVAYSLEEYAEAVVASVRFVCDRRSVKHPVICSESGRAIVSHHSVLIFEAVSADKPMVHQATPDDIQFLLEGNEEARANYEDLYAAVMRGDHESCLLYVDQLKQRCVEGFKEGVLSIEQLASVDGLCEWVLKAIGASDPVHTYNINLSVFTSIPDLWGIEQLFPIVPIHKLDQRPGARGILSDLTCDSDGKINKF

SEQ ID NO: 11638 - protein, 464 aa, Clostridium perfringens str. 13
MLFGKNELGSQFETPIFGTVESNESIPKYELAKKSIAPQVAYRLIKDDLLDEGNARQNLCTFCQTYMDDEAVKLMAETLEKNAIDKSEYPQTTDLENRCVNILADLWHAPKDESFMGTSTVGSSEACMLGGMAMKFRWRNRAKALGMDVTSRKPNLVISSGYQVCWEKFCVYWDIEMRLVPMDEEHMSINVDKVLDYVDDYTIGVVGILGITYTGKYDDIKALDKKLEEYNKTAKLTVPMHIDAASGGMFAPFIEPELEWDFRLKNVVSISTSGHKYGLVYPGIGWVLWRDKEYLPQELVFDVSYLGGKIPTMAINFSRSASQIIGQYYNFLRYGFEGYRQIHQRTKDVAMFLASELEKTGLFQIYNNGENLPIVCYKLRDDVNVDWTLYDLADRLLMKGWQVPAYPLPADLQDTIIQRIVCRADLSHNLAELYLRDLKAAIEDLNNARVLNQKSKTGVQGFTH

SEQ ID NO: 11639 - protein, 157 aa, Musa acuminata
MAGESCNLDKDEAEIFKPSPSSSPSPSPPSPPSSSQPPPPSSVLLKPSEESGIQRPEIPESPPAPTITFAASSTPKLDEEPSNPGEESPAPVRFSNRCSACRKKVGLTGFRCRCGDLFCGRHRYSDAHECSFDYKAAGREEIAKANPVIKAAKIIKI

SEQ ID NO: 11640 - protein, 236 aa, Rickettsia sibirica 246
MIDYTKTLTAASKNKTFDEGLRQYMLKVYNYMALALLLTGVAAVTTISVEPIYNLMFQTGFGTIIMFAPLGIALYFFMGFGQMNLPTAQILFWVYAGLTGMSLAYLALIYTGASIARTFFICSSVFGAMSLYGYSTSRDLTSMGSFFAMGLIGLIIASLVNLFLKSSALSFATSLIGIVIFMGLIAWDTQKIKSMYYMAGNDEVGQKLSIMAAFTLYLDFINLFLYLMRFLGNRRD

SEQ ID NO: 11641 - protein, 335 aa, Burkholderia fungorum LB400
MKLLIVSALGVATSIAFATSGAHAQRAPASVNDGIATVVAKRQQSLVGTRDFIDRRAAFEKLMAQVPVPDGVTIHHVDANGVPGKWVSLNHARVSGTHGRRVILYLHGGGFYSGSSNSHRALAATLARDAGADVLLPDYRRMPEARYPAQIDDAVTSYEWLLKQGYFASDIAVAGESAGGNLVLELALRLRAAHRPLPSSLVAMSPIMDLTASGDSTRTLASLDPVLTRAGLLDVTKVYMQGADPRSPDASPLFADLHGLPPLLLQVGAREILLDDSLRIARVAALDDVAVSVEVWPGMVHQWQLFPDVVPEARRALRNCAEFIDAHMARVATTQ

SEQ ID NO: 11642 - protein, 176 aa, Triticum aestivum
  misc_feature (25)..(25): Xaa can be any naturally occurring amino acid
MAPTVMASSATSVAPFQGLKSTAGXLPSAAAPTAASLGSVSNGGRIRCMQVWPIEGIKKFETLSYLPPLSTEALLKQVDYLIRSKWVPCLEFSKVGFIFREHNASPGYYDGRYWTMWKLPMFGCTDATQVINEVEEVKKEYPDAYVRIIGFDNMRQVQCVSFIAFKPPGCEESGKA

SEQ ID NO: 11643 - protein, 267 aa, Corynebacterium glutamicum ATCC 13032
MVATSQFIDDSEAAQAVRAAIVAGYRNIDTALAYGNERGVGEGIRTAGVPREELFISTKLAAEIKDYDGAVAAIDESLAKIGLDYVDLMLIHSPQPWSDFRGGDYSEGNREAWRALEDAYKAGKIRSIGVSNFLEADLENILDSATVAPHVNQLLVHVGNTPSELISFCDSKGILVEAYSPIAHGEMLKNQQVKAIADKYNVSIPQLCIRYTIQLGTVSLPKTANPDHMSSNAQIDFEISEEDMAALQEVTARDYGEHSGFPVYSGK

SEQ ID NO: 11644 - protein, 500 aa, Beta vulgaris subsp. vulgaris
MSMPIPSRQLFIDGEWREPIKKNRIPIINPSNEEIIGDIPAGSSEDIEVAVAAARRALKRNKGREWAATSGAHRARYLRAIAAKVTERKDHFVKLETIDSGKPFDEAVLDIDDVATCFEYFAGQAEAMDAKQKAPVTLPMERFKSHVLRQPIGVVGLITPWNYPLLMATWKIAPALAAGCTAVLKPSELASITCLEFGEVCNEVGLPPGVLNIVTGLGPDAGAPLAAHPDVDKVAFTGSSATGSKVMASAAQLVKPVTLELGGKSPIIVFEDVDIDQVVEWTMFGCFWTNGQICSATSRLLVHESIAAEFIDRLVKWTKNIKISDPFEEGCRLGPVISKGQYDKIMKFISTAKSEGATILCGGSRPEHLKKGYFIEPTIISDISTSMQIWREEVFGPVLCVKTFSSEDEALELANDTEYGLASAVFSKDLERCERVSKLLESGAVWVNCSQPCFVHAPWGGIKRSGFGRELGEWGIENYLNIKQVTSDISNEPWGWYKSP

SEQ ID NO: 11645 - protein, 311 aa, Zea mays
MLGCRKADPDLEAGRPSIQVVRASEPTIRLLFVFVLSLPSCRSPAPSSPLRRPSCETLARRAREKLAAMFGYRKADPDLEAGGSSLLYPGMTESPELRWAFVRKIYVILAVQLAMTAAVSAFVVKVPAVSNFFVSSNAGVALYIFLIILPFLVLCPLRYYHQKHPVNLLLLGLFTVAISFAVGMTCAFTSGKIILEAAILTAVVVISLTAYTFWAAKRGHDFNFLGPFLFAAIMVLMVFSLIQIFFPLGKISVMIYGGLASLIFCGYIIYDTDNVIKRYTYDEYIWAAVSLYLDVINLFLSLLQLLRAADS

SEQ ID NO: 11646 - protein, 588 aa, Zea mays
  misc_feature (394)..(394): Xaa can be any naturally occurring amino acid
  misc_feature (560)..(560): Xaa can be any naturally occurring amino acid
  misc_feature (572)..(572): Xaa can be any naturally occurring amino acid
MCGILAVLGCSDCSQARRARILACSRRLKHRGPDWSGLYQHEGNFLAQQRLAIVSPLSGDQPLFNEDRTVVVVANGEIYNHKNVRKQFTGAHSFSTGSDCEVIIPLYEKYGENFVDMLDGVFAFVLYDTRDRTYVAARDAIGVNPLYIGWGSDGSVWMSSEMKALNEDCVRFEIFPPGHLYSSAAGAGFRRWYTPHWFQEQVPRTPYQPLVLREAFEKAVIKRLMTDVPFGVLLSGGLDSSLVASVTKRHLVKTDAAEKFGTELHSFVVGLEGSPDLKAAREVADYLGTTHHEFHFTVQDGIDAIEEVIYHDETYDVTTIRASTPMFLMARKIKSLGVKMVLSGEGSDELLGGYLYFHFAPNREELHRETCRKVKALHQYDCLRANKATSAWGXEVRVPFLDKEFVDVAMGMDPEWKMYDKNLGRIEKWVLRKAFDDEEHPYLPEHILYRQKEQFSDGVGYNWIDGLKAFTEQQVTDEMMNSAAQMFPYNTPVNKEAYYYRMIFERLFPQDSARETVPWGPSIACSTPAAIEWVEQWKASNDPSGRFISSHDSAATDRTXTSWRWSTATGTXANGTVNGNDVAVAIAV

SEQ ID NO: 11647 - protein, 494 aa, Salmonella enterica subsp. enterica serovar Typhi Ty2
MSDVTLLAEVTTFLRQRHGQFIAGERQAGNGTNFSVTNPATGKIIADVVSTTPAQAKEAMQSARRAFDVWRKMPTLQRGALLLKLADTLAAHREELAQLESVCSGKTIMLSRGLELDQSVAFLRYFAGWAGKITGETLNVSLPSMGEERYTAFTQRQPIGVVVGIVPWNFSIMIAIWKLAAALVCGCTIVIKPSEYTPLTLLRVAELAKEAGFPDGVINVVNGAGGEIAQQLIAHPDCAKVSFTGSVATGEKVRRSATSSGKRVTLELGGKNAALFLNDLTAQAMVNGILEAGYLNQGQICAAAERFYLPQEKLDTVMTLLRQRLSEIVPGSPLDEKTVMGPLANQVQLEKVLRLIQRAREEGDTIVYGGETLPGEGYFLQPTAVKVRSKNSTLMHEETFGPVCSFIGYQNEKEALSHINDSPFGLAASVWSENISKALRYAEDIDAGMVWVNMHTFLDPAVPFGGMKGSGIGREFGSAFIDDYTELKSVMVRY

SEQ ID NO: 11648 - protein, 441 aa, Pseudomonas syringae pv. tomato str. DC3000
MALTREQQIAALEKDWAENPRWKNVTRTYSAADVVRLRGSVQPEHTFARLGADKLWNLVTQGARPSFRPDKDFVNCMGALTGGQAVQQVKAGIQAIYLSGWQVAADNNSAESMYPDQSLYPVDSVPTVVKRINNSFRRADQIQWKAGKTPGDEGYIDYFAPIVADAEAGFGGVLNAYELMKNMIEAGAAGVHFEDQLASVKKCGHMGGKVLVPTQEAIQKLVAARLAADVAGVPTIILARTDANAADLLTSDCDPYDKAFVTGERTHEGFYKVRAGLDQAISRGLAYAPYADLIWCETAKPDLDEARRFAEAIKKEYPDQLLSYNCSPSFNWKKNLDDATIAKFQRELSAMGYKHQFITLAGIHNMWYSMFNLAHDYARNDMTAYVKLQEQEFADAAKGYTFVAHQQEVGTGYFDDMTTVIQGGVSSVTALTGSTEEEQFH

SEQ ID NO: 11649 - protein, 160 aa, Triticum aestivum
  misc_feature (2)..(2): Xaa can be any naturally occurring amino acid
  misc_feature (7)..(7): Xaa can be any naturally occurring amino acid
  misc_feature (10)..(10): Xaa can be any naturally occurring amino acid
  misc_feature (17)..(17): Xaa can be any naturally occurring amino acid
  misc_feature (22)..(22): Xaa can be any naturally occurring amino acid
  misc_feature (24)..(24): Xaa can be any naturally occurring amino acid
  misc_feature (37)..(37): Xaa can be any naturally occurring amino acid
  misc_feature (45)..(45): Xaa can be any naturally occurring amino acid
  misc_feature (69)..(69): Xaa can be any naturally occurring amino acid
  misc_feature (72)..(72): Xaa can be any naturally occurring amino acid
  misc_feature (76)..(76): Xaa can be any naturally occurring amino acid
  misc_feature (94)..(94): Xaa can be any naturally occurring amino acid
  misc_feature (118)..(118): Xaa can be any naturally occurring amino acid
  misc_feature (132)..(132): Xaa can be any naturally occurring amino acid
  misc_feature (139)..(139): Xaa can be any naturally occurring amino acid
  misc_feature (151)..(151): Xaa can be any naturally occurring amino acid
MXPTVMXSSXNSVAPFXGLKSXAXLPVSRRSNGASLXSVSNGGRXRCMQVWPIEGIKKFETLSYLPPLXTEXLLKXVDYLIRSKWVPCLEFSKXGFIFREHNASPGYYDGRYWTMWKXPMFGCTDATQVINXVEEVKKXEYPDAYVRINRXSTTMRQGAV

SEQ ID NO: 11650 - protein, 493 aa, Thermoplasma volcanium GSS1
MDGKLYIDGQWVDSSNGDTLTKYNPVTGEVIGKFAAASRDDVDRAFDAAEDAFQKWMDLGSVERSKIIYKAKELIEENRKELENIIIQENGKPVKEAAEEVDGVLDQMQYYAEWARKLNGEVVEGTTNHRKIFQYKVPYGTVVALTPWNFPAGMVARKLAPALLTGNTVILKPSSDTPGSAEWIVKKFIQAGVPKGALNYITGRGSVIGDYIVEHKKVALITMTGSTSTGQRIMQKASANMAKLMLELGGKAPFMVWKDADINNALKTLLWAKYWNAGQSCIAAERLYVHEDIYDTFINKFVELSKKIVVGDPSRADMGPLINTTALKGTEEVVEEAKESGARILYGGSKPDLSGPYKNGYFFLPTIIDNVDQKSKIFQEEIFAPVIGARKVSDVEEMYSLANDSKYGLASYLFTKDPNLIFEAAERIRFGELYINMPGPEASQGYHTGFRLTGQAGEGSRYGILEYLKIKNIYVDYSGKPLQINTVRDDLFQ

SEQ ID NO: 11651 - protein, 404 aa, Escherichia coli
GKKITLQNGKLNVPENPIIPYIEGDGIGVDVTPAMLKVVDAAVEKAYKGERKISWMEIYTGEKSTQVYGQDVWLPAETLDLIREYRVAIKGPLTTPVGGGIRSLNVALRQELDLYICLRPVRYYQGTPSPVKHPELTDMVIFRENSEDIYAGIEWKADSADAEKVIKFLREEMGVKKIRFPEHCGIGIKPCSEEGTKRLVRAAIEYAIANDRDSVTLVHKGNIMKFTEGAFKDWGYQLAREEFGGELIDGGPWLKVKNPNTGKEIVIKDVIADAFLQQILLRPAEYDVIACMNLNGDYISDALAAQVGGIGIAPGANIGDECALFEATHGTAPKYAGQDKVNPGSIILSAEMMLRHMGWTEAADLIVKGMEGAINAKTVTYDFERLMEGAKLLKCSEFGEAIIE

SEQ ID NO: 11652 - protein, 1080 aa, Candida albicans SC5314
MYATAHTIKQQQQQQQQHPPPPLNGGLHASGAPPNSHEAAAIAQQQQQQQQHHNGPGMIVAAAAASANQQAVQARAQQQQQQQQQRLPSSAALNETTVSTWLAIGSLAESLGDIERATASYNSALRHSPNNPDILVKIANTYRSKDQFLKAAELYEQALNFHVENGETWGLLGHCYLMLDNLQRAYAAYQRALFYLENPNVPKLWHGIGILYDRYGSLEYAEEAFVRVLDLDPNFDKANEIYFRLGIIYKHQGKLQPALECFQYILNNPPHPLTQPDVWFQIGSVYEQQKDWNGAKDAYEKVLQINPHHAKVLQQLGCLYSQAESNPSTPANGAAPPHKPFQQDLTIALKYLKQSLEVDQSDAHSWYYLGRVEMIRGDFTAAYEAFQQAVNRDARNPTFWCSIGVLYYQISQYRDALDAYTRAIRLNPYISEVWYDLGTLYETCNNQISDALDAYRQAERLDPNNPHIKARLEQLTKYQQEGNTHPPQPPPSSQQPRLPQGMVLESTQQQQQQQPPPPPQQQQQQLQHQSQSQPQPQQPPQTQSQPSLLQHQSSLPPQQIQPLHQQAAKPLVNQQQSPPPPHLMNLGQPGQQPQQLPPHLPPHTQQPSQIQEKPPTQEQPHYQPPPPPQHQQQSQSQPQPPHQPQHTQNQSPQLAQLPPHHSNPPAKPHGAPQQRTGLPDLLHNSANIISAPSQVPQPQQQYQQPHIAPVRQEQVNHVPSIYSAPRPTETTLPQINNPNESTTTQVPQLKKEEPKPEATVSAPVPEAIKVQDQVTIQESAPAAAAAVSAPASAPVGDIKTDTVSTTTPATSTTADAVPVSVSQVGEAPNVVQEKKVPDTEQIVSQVEKPVESQPEVTPAPTPAPALATAPTEPAPTDKDVVMAPSKSATPVPQSIVEQNTRVSEATKAPESNGKHDLEDKNDEEKILKRPTVETTTESVPVNQPVEKENEKVEVPPPSEQPSSEKREKEVNGSIKKPLENESKVDIPQFSSNITAQNEEAKSGEETKKDTTKTSPAKQGEVKEVIPSSTETVSKPDVEKDNKEKDKDEDEVMADEDDVKKDENPEPPMRKIEEDENYDDE

SEQ ID NO: 11653 - protein, 372 aa, Glycine max
MAPSLETSNGEAMHLKQVEEEQDGILFAMNMMSTMVYPFVVRTAIELGIFDIIAKAGEGAKLSAEEIIEQLGTKNPEAPTMLDRLLRLLASHSMLSSSLDTEDLQHGQNSPKRLYSLTYASKYFVTDADGVSFGATLNLLLDKVFLESWTELKGAILEGGVAFNRVHSMHSFEYPAVDPRFNDVFNKAMFNLTTIVMKRVLEFYEGFKNINRLVDVGGGLGINLNLITSKYPHVQGVNFDLPHVIEHAPTYPGIEHVGGDMFESVPNGDAIFMKWILHDWSDEQCLKLLKNCHKAIPSDGKVIVVDLILPILPESTVTAKSGFQADLLMMTQNSGGKERTQHEFMELALSSGFSGIKIVCSVSGFWVMEFYK

SEQ ID NO: 11654 - protein, 119 aa, Triticum aestivum
TPSKAKYRRETDSEQVPRGKDEKDFEKRVKECLKLPGGKRMGHNEMTVPLTSAAIREVDVVGIFRYKDTWPLCLEFLRSGKIDVKPLITHRFGFSQGEVEEAFEVSARGRDAIKVMFNL

SEQ ID NO: 11655 - protein, 493 aa, Bordetella bronchiseptica RB50
MQDSQDNGQSGLAAMWIGGRETLAQDGQTIEIANPATRQPLARVPRGRQAEVDLAVAAASQAYAGWRACSPRERADALLRIADSLAAESEALARLLATETGNALRTAARPEAQGAAGIFRYYAGVAGEAKGETVPGAEGTLAYSVREPLGVVAAIIPWNSPVAAAAVKIASAIAVGNTIVVKTAEDAPLSALKLAALCNAALPAGVVNCLTGYGSECGAALAMHPGVRKISFTGSTETGKAIMRAAADRIVPVSLELGGKSPSIVYPSANCDWAVDGVMTAMRFTRQSQSCTAGSRLFVHRDIYDDFLRKLAGRLDRLVVGDPLDEATDMGALINQRQHAKVNDYIACGLAEPSARLLAGGPSPGEGRLAQGYFALPTLIAGVDNGWRVAREEIFGPVLVAIPWSDERQVLEMANDTHYGLAAYVWTTDLGEAMRGASALDAGWIQVNRGHAPGVGVSFGGVKNSGFGREFSLEGMLDSFTQRKSVTLDFSHA

SEQ ID NO: 11656 - protein, 405 aa, Arabis drummondii
YQGVYPVKCNQDRFIIEDIVEFGSSFRFGLEAGSKPEILLAMSCLCKGNPEAFLVCNGFKDSEYISLALFGRKLELNTVIVLEQEEELDLVIDLSQKMNVRPVIGLRAKLRTKHSGHFGSTSGEKGKFGLTTIQILRVVRKLRQVGMLDCLQLLHFHIGSQIPSTALLSDGVAEAAQLYCELVRLGAHMKVIDIGGGLGIDYDGSKSGESDLSVAYSLEEYAAAVVASVRFVCDQKSVKHPVICSESGRAIVSHHSVLIFEAVSAGQQHDTPTDVQFMLEGYSEEVRGDYENLYGAAMRGDRESCLLYVDQLKQRCVEGFKEGSLSIEQLAGVDGLCESVIKAIGASDPVLTYHVNLSVFTSIPDFWGIDQLFPIVPIHKLDQRPVARGILSDLTCDSDGKMDKF

SEQ ID NO: 11657 - protein, 142 aa, Brassica napus
MRSPISRFVSRSILFLHRATPLTAATRHLCAVASPEARTKKLDRIADELLKLNRIELYDYSILFSHKLGLNRYGSSVSVNAGDLPAGASASAETKAAEKTAFDVKLEKFEAASKIKVIKEIRAFTELGLKEAKELVEKAPVV

SEQ ID NO: 11658 - protein, 182 aa, Trichoderma atroviride
  misc_feature (56)..(56): Xaa can be any naturally occurring amino acid
QRQAEGKPTDKPNIIMSSAVQVCWEKAARYFEVEEKYVYCTPDRYTIDPQQAVDLXDENTIGIAAILGTTYTGHYEDVKGINDLLEEKGLDVSIHVDAASGGFVAPFVLPDLEWDFRLPRVVSINASGHKYGLVYPGVGWVVWRSHEYLPQDLIFNINYLGAEQSSFTLNFSKGASQVIGQY

SEQ ID NO: 11659 - protein, 405 aa, Barbarea vulgaris
YQGVYPVKCNQDRFIIEDIVEFGSKFRFGLEAGSKPEILLAMSCLCKGNPEAFLVCNGFKDSEYISLALLGKKLELNTVIVLEQEEELDLVIDLSQKMNVRPVIGLRAKLRTKHSGHFGSTSGEKGKFGLTTIQILRVVRKLRQVGMLDCLQLLHFHIGSQIPSTALLSDGVAEAAQLYCELVRLGANMKVIDIGGGLGIDYDGSKSGESDLSVAYTLEEYAAAVVASVRFVCDQKSVKHPVICSESGRAIVSHHSVLIFEAVSAGQQHETPSDVQFMLEGYSEEVRADYENLYGAAMRGDRESCLLYVDQLKQRCVEGFKEGSLSIEQLAGVDGLCESVIKAIGASDPVLTYNINLSVFTSIPDFWGIDQLFPIVPIHKLDQRPVARGILSDLTCDSDGKIDKF

SEQ ID NO: 11660 - protein, 401 aa, Brassica nigra
YQGVYPVKCNQDRFIIEDIVRFGSSFRFGLEAGSKPEILLAMSCFCKGNPEAFLVCNGFKDSEYVSFALLGRKLELNTVIVLEQEEELDLVIDLSPKMNVRPVIGLRAKLRTKHSGHFGSTSGEKGKFGLTTIQILRVVRNLRQLGMLDCLQLLHFHIGSQIPSTALLSDGVAEAAQLYSELVRLGAHMKVIDIGGGLGIDYDGSKSGESDLSVAYTLEEYAEAVVASVRFVCDQKSVKHPVICSESGRAIVSHHSVLIFEAVSAVKQHANPDDIQFLLEGEEAEYEDLYGAVMRGDRESCFLYVDQLKQRCVEGFKDGSLSIEQLVSVDGLCESVLKAIGASDPVQTYNINLSVFTSIPDFWGIDHLFPIVPIHKQDQRPGARGILSDFTCDSDGKIDKF

SEQ ID NO: 11661 - protein, 487 aa, Gibberella zeae PH-1
MIANPSLQHHHSHDSSSSYRSGSRSRHSTTPRAQRTAAELADFNSNHSSTAWSPATTTATATAPTSESTPTPASAGQTAHVSATGGASRFPSPPPSSSPAAATGPAYADDAKSSSMASDARDSGPLGHASRSGPVSHASAAQQPSPASDDFQISNQAYPLSGGPSQPPEQKVIHIRDLAHIQSLASADLLSGNGGSGILNDPPLQQMKYEISGMPIGDIIEMVAALLTKITTTNDLQHDAMQRNVAHQQQANQSGDSSGSSISSLNHSVLAFHGKNVPAITILSYLSRIHKYCPTTYEVFLSLLVYFDRMTERVNDMVTKNEEIRRQTQSQQTNTKTPQDTPMRGEGMNDTDESDSDLADDDDEEMTDAARQSRPSSNKGAATPTEHPAIAAATYFVVDSFNIHRLIISGVTCASKFFSDVFYTNSRYAKVGGLPLVELNHLELQFLLLNDFRLAVPVEDLEAYATMLVEFYAREVVAKQAGAGSTE

SEQ ID NO: 11662 - protein, 348 aa, Listeria monocytogenes EGD-e
MKALKLYGKRDLRYEEADMPTIEEPDDVILKVKTVGICGSDISRYSKLGPYVPGMVWGHEFSGEVIEVGSEVTDIEIGDRAAGCPALYCGECEYCKKGEFARCRKLTVIGARHPGAYAEYIKLPAENVVKIPNELDYEAAALVEPSAVVVHGFYHTKLQAGDDVVVVGSGNIGLLAIQWAKVFGARRVIAIDVDDKKLALAKEVGADVVINSLKEDPLEVVAAHTDGLNADLVVEAAGSPITSAQVFAYAKKGGGVVFLGIPYADVTIERFYFEKIVRSELTVWGSWNAISAPFPGKEWQTTIHFLANKQINIEPMITHRLSLAEGPEVFERIYERNEFFGKVLFFPE

SEQ ID NO: 11663 - protein, 181 aa, Triticum aestivum
  misc_feature (28)..(28): Xaa can be any naturally occurring amino acid
  misc_feature (68)..(68): Xaa can be any naturally occurring amino acid
  misc_feature (106)..(106): Xaa can be any naturally occurring amino acid
  misc_feature (171)..(171): Xaa can be any naturally occurring amino acid
YSPWAPTVMASSATSVAPFQGLKSTAGXPVSRRSNGASLGSVSNGGRIRCMQVWPIEGIKKFETLSYXCPPLSTEALLKQVDYLIRSKWVPCLEFSKVGFIFREHXRHPPGYYDGRYWTMWKLPMFGCTDATQVINEVEEVKKEYPDAYVRIIGFDNMRQVQCVSFIAFKXPPGCEESGKA

SEQ ID NO: 11664 - protein, 404 aa, Corynebacterium efficiens YS-314
MIGVSRPTPQNSYPGGSTVIVSTKPLTDRSRLSEAHAEMIKATLPLVGSKINDITPVFYNRMFTAHPELLRSTFNRANQKQGDQQKALAASIATFATMLVDPEAPDPVDMLARIGHKHVSLGITADQYNIVHEHLFGAIVEVLGADVVTPPVAEAWDAVYWLMANVLIDLESDLYASNDLAPGDVFRHVTVTGKKQLSDKVWEYTFEGDLVTPAPGQYTSIGVKLPDGARQLRQYSLLSGTDSQYRIAVEDNGEVSTFLRDNVEVGDTIEASVAAGDLVMNDDVNPVVLISQGIGSTPMVGMLNQVAADRHVTVLHADQSEKDHAQREEMVALVGGLANGALYTFYRDADQWLNVAGHIPSDASVYLCGGNEFLQNVRGQLENLEEQPREIRFELFSPNDWLIS

SEQ ID NO: 11665 - protein, 183 aa, Shigella flexneri 2a str. 301
MQDSILTTVVKDIDGEVTTLEKYAGNVLLIVNVASKCGLTPQYEQLENIQKAWADRGFVVLGFPCNQFLEQEPGSDEEIKTYCTTTWGVTFPMFSKIEVNGEGRHPLYQKLIAAAPTTVAPEESGFYARMVSKGRAPLYPDDILWNFEKFLVGRDGKVIQRFSPDMTPEDPIVMESIKLALAK

SEQ ID NO: 11666 - protein, 167 aa, Helianthus annuus
MATQSKKTLYDFTVKDAKGNDVDLSVYKGKVVLIVNVASKCGLTNNSYDELNQIYLKYKEKGFEILAFPCNQFGQQEPGTNEEIVDFVCTKFKSEFPIFDKIDVNGENAAPVYEFLKTGFYGILGGDIQWNFSKFLVDKNGQPVDCYYPTTSPLTVERDIQKLLGLL

SEQ ID NO: 11667 - protein, 233 aa, Zea mays
  misc_feature (161)..(161): Xaa can be any naturally occurring amino acid
  misc_feature (216)..(216): Xaa can be any naturally occurring amino acid
MAQILLHGTLHATIFEAESLSNPHRATGGAPKFIRKLVEGIEDTVGIGKGTTKIYATVDLEKARVGRTRMVSNEPVNPRWYESFHIYCAHMAADVVFTVKIDNPIGASLIGRAYLPVEDILGGDEIDKWLEIRDEKREPIGDSKIRVKLQYFDVGKDRNWXARGVRSTRYPGVPYTFFSQRQGCKVTLYQDAHVPDNFVPRIPLADGKNYEPHRVXWEDIFDAISKGQHLIYI

SEQ ID NO: 11668 - protein, 249 aa, Cucumis sativus
PGKCYPVVSEEYQKAIEKAKRKLRGFIAEKNCAPLMLRLAWHSAGTFCKDSKTGGPFGTMRFKSELAHGANNGLDIAVRLLEPIKEQFPILSYADFYQLAGVVAVEVTGGPDVPFHPGREDKPEPPPEGRLPDATKGSDHLRDVFYTMGLSDQDIVALSGGHTLGRAHKERSGFEGPWTTNPLIFDKSYFTELLTGEKEGLLQLASDKALLSDPVFRPLVEKYAADEDAFFADYAEAHQKLSELGFADA

SEQ ID NO: 11669 - protein, 373 aa, Candida albicans
MSVKTQTITVLPGDHVGTEIVNEPTKVLKAIEAPTPYQKIQFDFKHHLIGGAAIDATGVPLPDDALESAKSSDAVLLGAVGGPKWGTGTVRPEQGLLKIRKELNLYANIRPCNFASDSLLELSPLKAEVVKGTNLIIVRELVGGIYFGERQEQEESEDHQTAWYRPKYTVDEVTRITRMAAFMALQHNPPLPIWSLDKANVLASSRLWRKTVDKVISEEFPALSVQHQLIDSAAMILIQNPTKLSGIIITSNMFGDIISDEASVIPGSLGLLPSASLASLPDTNTAFGLYEPCHGSAPDLPANKVNPIATILSAASMLRLALDCVKETEALEEAVKQVLDSGIRTADLRGTSSTTEVGDAIAETVTKILKQNT

SEQ ID NO: 11670 - protein, 153 aa, Brassica napus
MAPTVMASSATSVAPFQGLKSTAGLPVSRRSNGASLGSVSNGGRIRCMQVWPIEGIKKFETLSYLPPLSTEALLKQVDYLIRSKWVPCLEFSKVGFIFREHNASPGYYDGRYWTMWKLPMFGCTDATQVINEVEEVKKEYPDAYVRIIGFDNM

SEQ ID NO: 11671 - protein, 421 aa, Arabidopsis thaliana
MEKKGSVLMLRYEVGKFLGQGTFAKVYHARHLKTGDSVAIKVIDKERILKVGMTEQIKREISAMRLLRHPNIVELHEVMATKSKIYFVMEHVKGGELFNKVSTGKLREDVARKYFQQLVRAVDFCHSRGVCHRDLKPENLLLDEHGNLKISDFGLSALSDSRRQDGLLHTTCGTPTYCAPEVISRNGYDGFKADVWSCGVILFVLLAGYLPFRDSNLMELYKKIGKAEVKFPNWLAPGAKRLLKRILDPNPNTRVSTEKIMKSSWFRKGLQEEVKESVEEETEVDAEAEGNASAEKEKKRCINLNAFEIISLSTGFDLSGLFEKGEEKEEMRFTSNREASEITEKLVEIGKDLKMKVRKKEHEWRVKMSAEATVVEAEVFEIAPSYHMVVLKKSGGDTAEYKRVMKESIRPALIDFVLAWH

SEQ ID NO: 11672 - protein, 428 aa, Bdellovibrio bacteriovorus HD100
MKALGRHILVEFSGCNAEVLNDVSIIERSMVEAAQIAGATVINSTFHHFSPWGVSGVVVIQESHLAIHTWPEYRYAAVDLFTCGDSVDPWVSFEHLKKAFQANYSALEMNRGSLHVIQKSDFQPKIMREKPSFDLSKGHQIDRNVWFTDKDENQALSLRYTGDVLFDETNPFQRVRVLDSYSHGKFLAINNMVMCTERDEYHYHEMITHPVMQTHGNAKNVLVIGGGDGGTIRELFKYNVDNVTMVEIDEAVVRASKEHLPKIACEFNNPKLNLIIGDGIQFVKDAPANSYDVIIVDGSDPVGPAKGLFTAEFYNNCKNALKDGGLVITQGESPMFHEGTFVELNHCLKGIFGKQSVHTMLFHATTYPSGMWSLQVAVKGSKHPAKDFNKDQAAKFAQDKGLKYYNEDLHTAAFSLPTFVKTMLGDNA

SEQ ID NO: 11673 - protein, 242 aa, Ceratopteris richardii
  misc_feature (8)..(8): Xaa can be any naturally occurring amino acid
  misc_feature (11)..(11): Xaa can be any naturally occurring amino acid
  misc_feature (19)..(19): Xaa can be any naturally occurring amino acid
MLNYSFDXVKXISSSDLIXPAGNYYQHVTFNEQGDLADDDGICYDIINSTGEKKRGLTVDQVKYLEMNFTMDFKLEPERKALIAKELGLRPRQVAIWFQNRRARWKNKQLEQDYETLKSSYEALLQENEDMVKRNKALDEENKLLQAEIARLTGISGNVDVPVDIDAKVASPDLDSDSDLESTVKGEKQQNLKSEIGIPAKLDAQSEILESLTLSCLKSQEAIVAFVEQPIGANDSVVACAL

SEQ ID NO: 11674 - protein, 429 aa, Xylella fastidiosa 9a5c
MSDLDKVTLNAGETSLVLPVLKPTLGNGCVDIAKLTKETGLFTYDSGFTATASCKSAITYIDGEKGVLLYRGYPIEQLAEHSSFLEVAYLLMNGELPRKDEFAKFDDEITHHTMMHESLKNFLGGFHYDAHPMAMLAASVASLSAFYHDTLDLNDLEQRRLAAIRLIAKVPTLAAAAHRYSIGWPIRYPRNNLGYVERFLHMMFEVPSEPLQLNPVVTKALDLLFILHADHEQNASTSTVRLVGSTGANPYASVAAGITALWGPAHGGANEAVLKMLEEIGDAKNVDLVIAKAKTKDKNSPFRLMGFGHRVYKHFDPRAKIIREMAHTVLGELGVNDPLLEVALKLEEAALKDDYFVQRKLYPNVDFYSGIIYKAINIPLEMFTVMFAIARTAGWVSHWLEQQVDPEMKISRPRQIYTGHGERDYKDAR

SEQ ID NO: 11675 - protein, 404 aa, Escherichia coli
GKKITLQNGKLNVPENPIIPYIEGDGIGVDVTPAMLKVVDAAVEKAYKGERKISWMEIYTGEKSTQVYGQDVWLPAETLDLIREYRVAIKGPLTTPVGGGIRSLNVALRQELDLYICLRPVRYYQGTPSPVKHPELTDMVIFRENSEDIYAGIEWKADSADAGKVIKFLREEMGVKKIRFPEHCGIGIKPCSEEGTKRLVRAAIEYAIANDRDSVTLVHKGNIMKFTEGAFKDWGYQLAREEFGGELIDGGPWLKVKNPNTGKEIVIKDVIADAFLQQILLRPAEYDVIACMNLNGDYISDALAAQVGGIGIAPGANIGDECALFEATHGTAPKYAGQDKVNPGSIILSAEMMLRHMGWTEAADLIVKGMEGAINAKTVTYDFERLMEGAKLLKCSEFGDAIIK

SEQ ID NO: 11676 - protein, 256 aa, Ceratopteris richardii
MPFIPATMKHHAALDSTDIKGKSKNSCKDLKSRALKRSRQDVVVDSDTEEKRRGLTMEQINILEMKFKEDVELEPERKTLIAKQLGLRPRQVAIWFQNRRARWKNKQVECKYELLKAQYDAVVKEKESITMEHESILEGNRRLHSESIEKANTLGGAISPALPSCNIMSPTDSADCQSEIIMSVDVIEGAISCCHPIQEPSSRMAADVVVETEYSFYSSLDNSFSQFPMLVRQLIANGHCLQDAYDIYLGCEYFYG

SEQ ID NO: 11677 - protein, 114 aa, Bartonella birtlesii
GGANEACLKMLQEIGSVKRIPEFIARAKDKNDPFRLMGFGHRVYKNYDPRAKIMQKTCHKVLKELNIQDDPLLDIAIELEKIALNDEYFVEKKLYPNVDFYSGITLKALGFQPK

SEQ ID NO: 11678 - protein, 192 aa, Ceratopteris richardii
MAWSVSVGSTSIPQDEDETKQSVITSGISKTKGHNQGHRKHPSKDVTKDIGDGDELMCGVEKKRRLTAEQVNFLETSFSMDLKLEPERKAHLAKQLGIQPRQVAIWFQNRRARWKNQQIEQDYESLKASYEAVVEEKERLLKEHDLALEANKRLQAEIARLTRSLQSYDRNGMSEPKGGTAEQWQIRGNVNQ

SEQ ID NO: 11679 - protein, 112 aa, Bartonella alsatica
ANEACLKMLQEIGSVKRIPEFIARAKDKNDPFRLMGFGHRVYKNYDPRAKIMQKTCHEVLKELNIQNDPLLDIAIELEKIALNDKYFVEKKLYPNVDFYSGITLKALGFPTK

SEQ ID NO: 11680 - protein, 445 aa, Arabidopsis thaliana
MIFRRRRMRRNKSQVSQRASVLFPGCGELNYARETGDVTLEATLRKISSSLEDVVEVPDSPEESYISSSRRTGLACISAQENGSDDEITHDEQVATWSAISKETKSLIHLNGVASVASSHLSGFRAKKSSNGLKDHGRPKFSFNSHTHGETSSKISDMAEIFEPDVEDQAIEEDPIIECPNSFDERSENRQGVSVAESREVLHECTKDAVPKLQEIPLDKIRLIKRSSELDSRHEAKSRKFTHKGNSSNFQDSDTDDELPGPMDSGSSSDDEPSYQSSVPNISNQKKQFVGDRFDEAIKASSLSKEGLLFGSPKLSGGSSLYGKLQQIMKQEKETEMEIMRKLQSGIGEADSSGYVDVKVMSRHLEGKLVVCKCSVIDLSGDSLLLKNTQALAAKETETTIIFSPKVCADVDIEIGNFIRVYAPWSVLIPLFRLLSHVTKLFCDI

SEQ ID NO: 11681 - protein, 440 aa, Glycine max
MMGEKSNSNSGDAINSTLLHGKYELGRLLGHGSFAKVYHARHLNTGKSVAMKVVGKEKVVKVGMMEQIKREISAMNMVKHPNIVQLHEVMASKSKIYIAMELVRGGELFNKIARGRLREETARLYFQQLISAVDFCHSRGVFHRDLKPENLLLDDDGNLKVTDFGLSTFSEHLRHDGLLHTTCGTPAYVAPEVIGKRGYDGAKADIWSCGVILYVLLAGFLPFQDENLVALYKKIYRGDFKCPPWFSSEARRLITKLLDPNPNTRITISKIMDSSWFKKPVPKNLVGKKREELNLEEKIKHQEQEVSTTMNAFHIISLSEGFDLSPLFEEKKREEKELRFATTRPASSVISRLEDLAKAVKFDVKKSETKVRLQGQENGRKGKLAIAADLYAVTPSFLVVEVKKDNGDTLEYNQFCSKELRPALKDIVWRTSPAENPTLA

SEQ ID NO: 11682 - protein, 357 aa, Trichoderma atroviride
MAEFVRAQIFGTTFEITSRYSDLQPVGMGAFGLVCSARDQLTNQNVAVKKLMKPFSTPVLAKRTYRELKLFKHLRHENVISLSDIFISPLEDIYFVTELLGTDLHRLLTSRPLEKQFIQYFLYQIMRGLKYVHSAGVVHRDLKPSNILVNENCDLKICDFGLARIQDPQMTAYVSTRYYRAPEIMLTWQKYDVEVDIWSAGCIFAEMLEGKPLFPGKDHVNQFSIITELLGTPPDDVINTIASENTLRFVKSLPKRERQPLRNKFKNADDSAIDLLERMLVFDPKKRITATEALAHDYLAPYHDPTDEPVAEEKFDWSFNDADLPVDTWKIMMYSEILDYHNVEGVPQMEDQQFPPQ

SEQ ID NO: 11683 - protein, 120 aa, Oryza sativa (japonica cultivar-group)
MAPRCATLAVVVVLVAAVVAPPTAVRAAISCSAVYNTLMPCLPYVQAGGTVPRACCGGIQSLLAAANNTPDRRTICGCLKNVANGASGGPYITRAAALPSKCNVSLPYKISTSVNCNAIN

SEQ ID NO: 11684 - protein, 319 aa, Solanum nigrum
MGSKYSKATNSINDASNSSYRVPFESLRVPFVDLQEATNNFDDKFLIGWGVFGKVYMGVLRNGTKVALKKHMPESSQGIEEFRTEIEILSLCSHPHLVSLIGYCDERNEMILIYEYMENGNLRSHLYGSDLPAMSWEQRLEICIGAARGLHYLHTSAVIHRDVKSINILLDDNFVPKITDFGLSKTGTELDQTHVSTAVKGTVGYLDPEYFIRGQLTEKSDVYSFGVVLFEVLCARPAIAHSHSREMISLAEWAVESHNNGQLEQIIAPNIAAKIRPESLKKFGETVVKCLALSSEDRPSMGDVLWKLEYALRLQESVI

SEQ ID NO: 11685 - protein, 401 aa, Brassica oleracea
YQGVYPVKCNQDRFIIEDIVRFGSSFRFGLEAGSKPEILLAMSCFCKGNPEAFLVCNGFKDSEYVSFALLGRKLELNTVIVLEQEEELDLVIDLSPKMNVRPVIGLRAKLRTKHSGHFGSTSGEKGKFGLTTIQILRVVRNLRQLGMLDCLQLLHFHIGSQIPSTALLSDGVAEAAQLYCELVRLGAHMKVIDIGGGLGIDYDGSKSGESDLSVAYTLEEYAEAVVASVRFVCDQKSVKHPVICSESGRAIVSHHSVLIFEAVSAVKQHANPDDIQFLLEGEEAEYEDLYGAVMRGDRESCFLYVDQLKQRCVEGFKDGSLSIEQLVSVDGLCESVLKAIGASDPVQTYNINLSVFTSIPDFWGIDHLFPIVPIHKQDQRPGARGILSDFTCDSDGKIDKF

SEQ ID NO: 11686 - protein, 123 aa, Zea mays
MVSALRFFTCLVLAVCIVASVDAAISCNTVVGSLGTCYVYLRQGGIVPPSCCRGVRNLNGMAQTTPDRQQACKCVQSFTKSVPGLNQNLASGLPGKCGVSLPYPISISMNCDNVKLSGTHISS

SEQ ID NO: 11687 - protein, 180 aa, Salmonella typhimurium
GSMQTIKCVVVGDGAVGKTCLLISYTTNKFPSEYVPTVFDNYAVTVMIGGEPYTLGLFDTAGQEDYDRLRPLSYPQTDVFLVCFSVVSPSSFENVKEKWVPEITHHCPKTPFLLVGTQIDLRDDPSTIEKLAKNKQKPITPETAEKLARDLKAVKYVECSALTQKGLKNVFDEAILAALE

SEQ ID NO: 11688 - protein, 405 aa, Capsella bursa-pastoris
YQGVYPVKCNQDRFIIEDIVEFGSSFRFGLEAGSKPEILLAMSCLCKGNPDAFLVCNGFKDSEYISLALFGRKLELNTVIVLEQEEELDLVIDLSQKMNVRPVIGLRAKLRTKHSGHFGSTSGEKGKFGLTTIQILRVVRKLRQVGMLDCLQLLHFHIGSQIPSTALLSDGVAEAAQLYCELVRLGAHMKVIDIGGGLGIDYDGSKSGESDLSVAYSLEEYAAAVVASVRFVCDQKSVKHPVICSESGRAIVSHHSVLIFEAVSAGQQHETPTDVQFMLEGYSEEVRGDYENLYGAAMRGDRESCLLYVDQLKQRCVEGFKEGSLGIEQLAGVDGLCESVIKAIGASDPVLTYHVNLSVFTSIPDFWGIDQLFPIVPIHKLDQRPVARGILSDLTCDSDGKIDKF

SEQ ID NO: 11689 - protein, 183 aa, Triticum aestivum
MAGVGRNMVAPLLVLNLIMYLIVIGFASWNLNHFINGLTNRPGVGGNGATFYFLVFAILAGVVGAASKLAGVHHVRTWRGDSLATSASSALVAWAITALAFGLACKEIHIGGYRGWRLRVLEAFVIVLMFTQLLDVLALHSGLFGNQFGGNHAGGYPAEHAYGAGGDPHNKGMGMGTGGVARV

SEQ ID NO: 11690 - protein, 293 aa, Triticum aestivum
  misc_feature (269)..(269): Xaa can be any naturally occurring amino acid
SARGRVTSPQQSFSHQQQPFPQQPYPQQPYPSQQPYPSQQPFPTPQQQFPQQSQQPFTQPQQPTPLQPQQPFPQQPQQPQQPFPQPQQPFPWQPQLPFPQQPQQPFPQPQQPQQQFPQSQQPQQPFPQPQQQFLQPQQPQQSFPQQQQPLIQLSLQQQMNPCKNFLLQQCNPVSLVSSLISMILPRSDCQVMQQQCCQQLAQIPQQLQCAAIHSVVHSIIMQQEQRQGVQIRRPLFQLVQGQGIIQPQQPAQLEVIRSLVLRTLPTMCXVYVSPDCSTINAPFASIVVGIGGQ

SEQ ID NO: 11691 - protein, 143 aa, Saccharomyces cerevisiae
MCRFPRMILATVQKMISEILDQDLMFTKDAREIIINSGIEFIMILSSMASEMADNEAKKTIAPEHVIKALEELEYNEFIPFLEEILLNFKGSQKVKETRDSKFKKSGLSEEELLRQQEELFRQSRSRLHHNSVSDPVKSEDSS

SEQ ID NO: 11692 - protein, 349 aa, Chenopodium rubrum
SKTHFKMTTLETEQEQQPFSQNSPLFLDCLYCEEKYWDYDYHDEDDFGSLNSSKLHDCSLICCEDDEEIQLNALVSKEEKINFDEGDLGGNQLVMETRREALEWMIRVNYHHNFSVITLVLGVNYFDRFMLSFGFQKEMPWMTHLAAVACLSLASKVEETHVPLLLDFQVEHEQIFEAKVVQRMELLVLQHSNGKMNAVTPLSYFGHLIRKLKLKPHFHCKILTRCENIIVSVILDPRFLCYVPSVLAAASMVQTLKEIGLWSILEHQNDIMNTLKLDKVKVEDCYNFIQEVSSNEKARKRKWYNNISSANRNPNNVLELVVSSESSNNDLPSETLPKKCRTMGPPCFG

SEQ ID NO: 11693 - protein, 504 aa, Ralstonia solanacearum GMI1000
MRVSELLSSLSIDGAASVEGGHQVRSPIDGTLIGSVKLVSAKESEAAIERAHAAFLQWRGVPAPVRGELVRLLGVELRRHKEALGRLVTLEAGKLLSEGLGEVQEMIDICDFAVGLSRQLYGLTIASERPGHRMMETWHPVGVVGVISAFNFPAAVWAWNSALAFVCGDSVVWKPSEKTPLTALACDALFRKAVAAFGKAHQGTAPDGLHALIVGGREAGEALVQSKRVPVVSATGSTRMGRLVSARVGERLGRAILELGGNNAMIVAPSADLELATRAITFAAVGTAGQRCTTLRRLIVHESVAANLVERLKRIYGSVTVGNPLQEGTLVGPLIDAGAYAAMARALERADAQGGRVHGGERTHLEAGPEAYYVKPALVEMPAQTEVMQQETFAPILYVLTYRTLDEAIALQNGVPQGLSSAIFTRDLNEAEWFLSAAGSDCGIANVNIGTSGAEIGGAFGGEKETGGGRESGSDAWKAYMRRATNTINYSNRLPLAQGVRFDV

SEQ ID NO: 11694 - protein, 882 aa, Zea mays
MSYTISGGGTAPAAWAWLHGDLELTIHEARGLPNMDLLSTLLRRLCLCPPLAGITPARRRSLSDDDDDSAHAHAHTHPHHHHLRGRLHRRPRRRHEPQPHGHLLLPTSDPYAAVVVAGPHETTVARTYVFRNSEAPRWEASFLLPLAHAATGLEFHVKDADPFGSDLIGVAWLPAAAVLASAAAPIESQWLDLARPDARGPPAPGGGSAIRVSAAFVPAAASRGRSGVGVPAYFPLRRGCDVRLYQDAHVAAGELEGVGVVPGFLPGRCWEDLCMAVLGAQRLVYVAGWSVHTTVRLTREAMSPEMAAKVAELEELGGEPVEHMSLGELLKYKSQEGVRVLLLVWDDRTSHNNFFVKMVVGTLYTHHQKCVLVDTPASESTRRITAFLGGLDLCAGRYDTPSHRLFRDLQTVFHGDVYNPTFGGDVNGPRQPWHDLHCRLDGPAAYDILKNFEQRWRKATKLREMFGGKAAHRKDDALLKLERIPWILSPTKPKQQPPSAAADTGAADHDDDERDQPALHVLPDGDPERWHAQVFRSVDAGSVKRFPRPWERAEMARRHLVGDKNLAVERSIHAAYVAAIRSAERFVYVENQYFIGGSYAWPSYRNGGACNLVPMEIALKVASKVRAGEPFAAYVVLPMWPEGNPGSGPAQEILFWQNQTMEMMYSVVAAALEGKGGHPQEHLNFYCLGNREPAEDAGDGNKWAPADPLDDATTSSAAAHARRHRRFMVYVHSKGMIVDDEYVIIGSANINQRSLAGSRDTEIAVGAYQPDHTGACPRGKVHGYRMSLWEEHLGKEAVRRPEVLRPESPRCVKLVNRIARDNWRRYAADDDKLGPLQGHLLRYPVHVRADGRVEPLPGNELFPDVGGRVVGAPNNLPDYLTM

SEQ ID NO: 11695 - protein, 405 aa, Arabidopsis arenosa
YQGVYPVKCNQDRFIIEDIVEFGSSFRFGLEAGSKPEILLAMSCLCKGNPEAFLVCNGFKDSEYISLALFGRKLELNTVIVLEQEEELDLVIDLSQKMNVRPVIGLRAKLRTKHSGHFGSTSGEKGKFGLTTIQILRVVRKLSQVGMLDCLQLLHFHIGSQIPSTALLSDGVAEAAQLYCELVRLGAHMKVIDIGGGLGIDYDGSKSGESDLSVAYSLEEYAAAVVASVRFVCDQKSVKHPVICSESGRAIVSHHSVLIFEAVSAGQQHETPTDHQFMLEGYSEEVRGDYENLYGAAMRGDRESCLLYVDQLKQRCVEGFKEGSLSIEQLAGVDGLCEWVIKAIGASDPVLTYHVNLSVFTSIPDFWGIDQLFPIVPIHKLDQRPVARGILSDLTCDSDGKIDKF

SEQ ID NO: 11696 - protein, 150 aa, Glycine max
  misc_feature (112)..(112): Xaa can be any naturally occurring amino acid
MAAAFASRCSRVGRSLSGGLSNSSPGLFTSSHGMTCNNLFSQQQRTFIQMRTVLKVVDNSGAKKVMCIQALKGKKGARLGDTIIASVKEAHPNGKVKKGKVVYGVVVRAAMXRLVDKQGQPSGTRVLGPLPHELRQKKHVKIFTLAGHIA

SEQ ID NO: 11697 - protein, 257 aa, Oryza sativa (japonica cultivar-group)
MSPPLELDYIGLSPPVPAAADAAADNDLKGTELRLGLPGSHSPDRSPPAATLDLLPAAKGAKRGFSDEARPLPASAAAAAAAGKGKKAAAGEEDEDAEEEDKKVAAAPQAPAAKAQVVGWPPIRSYRKNTMATNQLKSSKEDAEAKQGQGFLYVKVSMDGAPYLRKVDLKTYKNYKDLSTALEKMFIGFTTGKDGLSESRKDGEYVLTYEDKDGDWMLVGDVPWEMFANSCRRLRIMKGSDAIGLAPRAVDKSKNRN

SEQ ID NO: 11698 - protein, 320 aa, Oryza sativa (japonica cultivar-group)
MEAEAAAKRARESGDAAAAGAGEQAGISAVIPGWFSEISPMWPEAHSLKVEKVLFQGKSDYQNVMVFQSSTYGKVLVLDGVIQVTERDECAYQEMITHLPLCSIKDPKKVLVIGGGDGGVLREVSRHSSVEQIDICEIDKMVVDVSKQFFPHLAVGFEDPRVSLHIGDVAFLKNAPEGTYDAVIVDSSDPPGPAQELFEKPFFQSVARALRPGGVVCTQAESIWLHMHIIEDIVANCRQVFKGSVNYAWTTVPTYPGVIGFMLCSTEGPTVDFQHPIFNIEDNEFSTKSKGPLKFYNSEIHSASFCLPSFAKRVIGSKAN

SEQ ID NO: 11699 - protein, 418 aa, Desulfitobacterium hafniense DCB-2
MSRIKNLREEALEFHKVQPGKLEVRVTVPAQDRDDLTLAYSPGVAEPVKEIAADLENLDIYTNHANYVSIVSNGTAILGLGDLGAAASMPVMEGKSLLFKAFGDVDAFPLCVNTTDVDKIVEIVELTSPTFGGVNLEDIKAPECFEIEEKLKARGIFKGPIFHDDQHGTAVVTLAGLVNALKVVGKKIEDIKVVANGAGAAGIAIIKLLMSMGLKNVIMCDTKGAIYEGRTVGMNPWKEEIAKATNPEKFSGDLAGALVGADAFIGISAANVLNEDMIRSMAKDPIVFCQANPIPEIWPIERAFEAGAKVISTGRSDVINQINNVLAFPGMFRGAIDVRATDINDAMKVAAAYAIAGIVKDEELSADYIIPSTFNPEVAPAVAAAVAKAAIDSGIARRPMDPQEVADGLKKRLANQYK

SEQ ID NO: 11700 - protein, 128 aa, Brassica napus
MTPAIKAPLLPSHDPSSSSPPEEKHGSLAGAIFNVSTSIVGAGIMSIPAAFKVLGVIPSLSIIVIIAWLSNVSAGFLMKSTVAGDATTYAGVMKESFGKPGSVAVQVITMVVTFGSMIIFSIIIGKMF

SEQ ID NO: 11701 - protein, 146 aa, Glycine max
MASEDDAVKKAMIVDARARNISHNVRCTECGSQSIEDSQADIAILLRKLIRDEIQSGKTDKDIYKKLEDEFGETVLYTPKFDMQTAALWLLPLLIAGSAAGVWAYNRHKQKTNVHIMALNLVRGVPLTPKKKKKSNVPTLEGGARY

SEQ ID NO: 11702 - protein, 181 aa, Arabidopsis thaliana
MENDDITVAEMKPKKRAGRRIFKETRHPIYRGVRRRDGDKWVCEVREPIHQRRVWLRTYPTADMAARAHDVAVLALRGRSACLNFSDSAWRLPVPASTDPDTIRRTAAEAAEMFRPPEFSTGITVLPSAGEFDTSDEGVAGMMMRLAEEPLMSPPRSYIDMNTSVYVDEEMCYEDLSLWSY

SEQ ID NO: 11703 - protein, 274 aa, Ceratopteris richardii
MAWSPVKEEHLPQLVSTESTIEKTLKAKDPCKRPKRRAKKRTGKGSTIDDSIDKRRGLTVEQINFLEMSFKEDNKLEPERKACIAKQLGVRPRQVAIWFQNRRVRWKNKQVEQDYETLKARYQDVVKEKDSIMMQYESTMEGNRKLQAEVARLTNLLQSTEGISAHTDMDQVLSNCNSENLNCISENISPAKSADYPSEIIVSGDPTEGDISRFIFQEPISSMPYDLLPDGDYFILSPENSTGSFPSLVQQLVSNGHCVEDAYNIYLGYEYLCC

SEQ ID NO: 11704 - protein, 227 aa, Ceratopteris richardii
RRSPPKEELDDDDLGDELSNPTEKNRRLTAEQVNFLEMSFNIDLKLEPERKALLAKKLGIRPRQVAIWFQNRRARWKNKQIEQDYESLKTKYEAVIKEREVILLQHEAAMQENKRLQAEVRRLMDLVEATGVGACDVTGVSEGKSELMSPSKSTGRSRVTCKTRVKCHSIAVSASGADVPMPRFELDYGFCRSNDMGVDLHECPTFSLWRIFLGLICPCLFVKFASK

SEQ ID NO: 11705 - protein, 336 aa, Euglena gracilis
MAQTIPDQTALPDTTNWQLSDLTLKETLGTGTFGRVRLCLHKSSGNYYAIKCLKKSEVLRMKQVEHILAEASILGSIRHPFIVNMLKTFQDDKRLYIVLEYVVGGELFSHLRKAGKFPNDVAKFYAAEVILAFEYIHSMDILYRDLKPENLLLDVGGHIKITDFGFAKKVPERTFTLCGTPEYLAPEIIQSKGHGKAVDWWALGILTYEMLVGYPPFFDESPFRIYEKILEGKVQFPKWVDGRAKDLIKGLLTTDHTKRLGTLKRGVTDIKKHKWFYGVDWDMLLARKIPAPIPVKVTTPGDSRYFDRYPESKEDKSQPLTPAQQELFKGFGPYST

SEQ ID NO: 11706 - protein, 323 aa, Salmonella enterica subsp. enterica serovar Typhi Ty2
MKPENKIPVLTRLSDEMTAVVNFQQPGLPPWPADGDIETQRQYYLLERRFWNADAPSMTTRTCAVSTPYGDVTTRLYSPQPTSQATLYYLHGGGFILGNLDTHDRIMRLLARYTGCTVIGIDYSLSPQARYPQAIEETVAVCSYFSQHADEYSLNVEEIGFAGDSAGAMLALASALWLRDKHIRCGNVIAILLWYGLYGLQDSVSRRLFGGAWDGLTREDLDMYEKAYLRNDEDRESPWYCLFNNDLTRDVPPCFIASAEFDPLIDDSRLLHQTLQAHQQPCEYKMYPGTLHAFLHYSRMMTIADDALQDGARFFMARMKTPR

SEQ ID NO: 11707 - protein, 395 aa, Zea mays
EFPGEKPLLSHLRFFPWVVNEVYFKVWRQGRTGYPLVDAGMRELWATGWVHDRIRVVVSSFFVKVLQLPWRWGMKYFWDTLLDADLESDALGWQYISGSLPDGRELDRIDNPQFEGYKFDPHGEYVRRWLPELARLPTEWIHHPWDAPESVLQAAGVELGSNYPRPIVELDAANSRLQDALSEMWELEAASRAAMENGMEEGLGDSTDEPPIDFPQELRMEVDRQPVQPAIHAPGVTGRRREDQMVPSMTSSFIRAETELTADFGHTSEDSRPEVPSNIHHLQARPEREETVDGGTGNAVRVHGNHHQQNLQNNMHRVLGIAPSISEASSSWTGRDGGVVPVWSPPAASGHSDSYAADEADISSRGYLDRHPQSHTMMNWSQLSQSLTTGWEVDN

SEQ ID NO: 11708 - protein, 147 aa, Triticum aestivum
  misc_feature (9)..(9): Xaa can be any naturally occurring amino acid
GASKTYPQXQAGAIRKGGHIVIKARPCKVVEVSTSKTGKHGHAKCHFVAIDIFNGKKLEDIVPSSHNCDVPHVDRQDYQLIDITDDGYVSLLTESGNTKDDLKLPTDDVLLGQIKTGFADGKDLILSVMSAMGEEQICAVKEIGGGK

SEQ ID NO: 11709 - protein, 250 aa, Plantago major
AGERFTVYVIVPMWPEGLPESASVQAILDWQRRTMEMMYKDVIQAFQARGIQDDPRKYLTFFCVGNREVKKSGEYEPSQQPEPDSDYGRAQAARRFMIYVHAKMMIVDDEYIIVGSANINQRSMDGARDSEIAMGAYQPYHLAARQPARGDIHGFRMSLWYEHLGMLDDSFVRPESEECVQKVNTIADRYWDLFAAEELERDLPGHLLRYPVAVSSEGTITELPGQEFFPDTKARVLGTKSDFLPPILTT

SEQ ID NO: 11710 - protein, 166 aa, Triticum aestivum
  misc_feature (29)..(29): Xaa can be any naturally occurring amino acid
  misc_feature (50)..(50): Xaa can be any naturally occurring amino acid
  misc_feature (55)..(55): Xaa can be any naturally occurring amino acid
  misc_feature (60)..(60): Xaa can be any naturally occurring amino acid
  misc_feature (71)..(72): Xaa can be any naturally occurring amino acid
  misc_feature (78)..(79): Xaa can be any naturally occurring amino acid
  misc_feature (86)..(86): Xaa can be any naturally occurring amino acid
  misc_feature (105)..(105): Xaa can be any naturally occurring amino acid
  misc_feature (107)..(107): Xaa can be any naturally occurring amino acid
  misc_feature (113)..(113): Xaa can be any naturally occurring amino acid
  misc_feature (117)..(117): Xaa can be any naturally occurring amino acid
  misc_feature (122)..(122): Xaa can be any naturally occurring amino acid
  misc_feature (125)..(126): Xaa can be any naturally occurring amino acid
  misc_feature (131)..(131): Xaa can be any naturally occurring amino acid
  misc_feature (134)..(134): Xaa can be any naturally occurring amino acid
  misc_feature (136)..(136): Xaa can be any naturally occurring amino acid
  misc_feature (149)..(149): Xaa can be any naturally occurring amino acid
  misc_feature (151)..(151): Xaa can be any naturally occurring amino acid
  misc_feature (157)..(157): Xaa can be any naturally occurring amino acid
FPQFQQPHQPFPQPQQQFPQPQQPQQSFXLQPQQPFPQQPQQPFPQQPQXSFPEXPQQPXPQQPQQPFPQXXQQPFPXXQPQQPFXLRPEQPFAQQPQQSQQSFXQXQPQQPXQPCXLQPQXTIXXQPQQXISXAXNEQLSQQPEQTIXQXPQQPLXPSHTNLQPY

SEQ ID NO: 11711 - protein, 435 aa, Thermoplasma volcanium GSS1
MIQLLNNLWVLFSAFLVFLMTIAVGFLEYGELGIALKRSLYKTILITGIAFVVMAVIGFNTAFAPTLYGIIGNPLYKPGFVLGYLNSPTAMFSTIWWATSASYFNTGLLGITYFLFETAFASVTLALVSVVILRKVKMSVFVVFSIVYFIVIYNLPAAWIWNPTGWLYLLGMRDFAGGLVVHGAAGFAGLAIIIRIWQEERKKGIVRSPGEIIKVNDGFLTLAILLLMMGWFGFNPGSVLAFNYDTLIVVMTTFMAALTSMLSTLTVSYLLYKDAGGIMNAVNGILMGLIIVTPLAGFVSPLSAAILGILGGPIFIFANRFFSKRKWFSDPVGLFSGHFTGGIFGVLMIGFFTQHSYAVLSGNSILPNGLFFGGGYLALHTLGIEIMGICAVGLAVFAISYATMYFLSLGFHGILEEPEWKKEERKSLPSSETSK

SEQ ID NO: 11712 - protein, 46 aa, Yersinia enterocolitica
MKGQVKWFNESKGFGFITPADGSKDVFVHFSAIQDQGFKTLAEGQN

SEQ ID NO: 11713 - protein, 282 aa, Candida albicans SC5314
MSYRLIKLNSGHTIPSIGLGCYDIPRNKTVSVVYEACKVGYRHFDTAVLYGNEEEVIEGISKFLRENPNIPRSEFFYTTKLWNNQLGTSSTKQAISTMMAQVGDKLEYIDLLLIHSPLPGKTKRLESWKVLQDAVEKGWIKNIGVSNYGKHHIEELLTNATIPPAVNQIEISPWCMRQDLATWCLSKGINVEAYAPLTHGNKLQVNNTEFQEIMQKYNKSAAQILIKWSLQKGYIPLPKTKTPSRLKENLSVDDFELTNEEIKAIDQPDAYEPTDWECTDAP

SEQ ID NO: 11714 - protein, 194 aa, Ceratopteris richardii
NQGHRKHPSKDVTKDIGDGDELMCGVEKKRRLTAEQVNFLETSFSMDLKLEPERKAHLAKQLGIQPRQVAIWFQNRRARWKNQQIEQDYESLKASYEAVVEEKERLLKEHDLALEANKRLQAEVCFKHAMSLLWSGYEESHVNIYSMTDSITNAYFHCLTRRHSSLILLHFSSQHTLIGFGGICDAWSPTFRYI

SEQ ID NO: 11715 - protein, 216 aa, Magnaporthe grisea 70-15
MAQSGTGAYNNPLKKFKLVFLGEQSVGKTSLITRFMYDSFDGMYQATIGIDFLSKASKPPAHPHRSSESTVRLQLWDTAGQERFRSLIPSYIRDSSVAVVVYDISNAKSFQNTRKWIDDVRAERGNDVIIVLVGNKTDLNDKREVTTQQGEEEAKKNNLMFIETSAKVGHNVQPLFKRIARSLPGMEGTEAAQQAASQMIDVKTNNTQAQQEGCAC

SEQ ID NO: 11716 - protein, 340 aa, Arabidopsis thaliana
MSSTQEASVTDLPVKRPREAEEDNNGGAMETENGGGEIKEPSCMSSIIPGWFSEISPMWPGEAHSLKVEKILFQGKSDYQDVIVFQSATYGKVLVLDGVIQLTERDECAYQEMITHLPLCSISNPKKVLVIGGGDGGVLREVARHSSVEQIDICEIDKMVVDVAKQYFPNVAVGYEDPRVNLIIGDGVAFLKNAAEGTYDAVIVDSSDPIGPAKELFEKPFFESVNRALRPGGVVCTQAESLWLHMDIIEDIVSNCRDIFKGSVNYAWTSVPTYPSGVIGFMLCSSEGPQVDFKKPVSLIDTDESSIKSHCPLKYYNAEIHSAAFCLPSFAKKVIDSKAN

SEQ ID NO: 11717 - protein, 297 aa, Methanopyrus kandleri AV19
MKRETFRYRGDMDLDGFLREMERVGALGAGRLGRAARILEKMWSSDDVTVLLTVAGPAVAGGLGELFERLIREGLVDAVITSGANVVHDALDALGGIHVCLGERNVDGYGRVHDTHIPTEAFEKFEHFMREVLSDLSGRVSCRELLWEMGKRLESGFLRAAADEGVPIYSPGILDSMVGLHVWIHSQDHDFHLDLVDDMHHLADLVFEAEELGAIILGGSVPKHFAMGAAMLRGGLDYAVQITMDRPETGSLSGAPLEEGKSWEKVREDAEVATIVGDYLIIFPLLASGVMQRLGIV

SEQ ID NO: 11718 - protein, 319 aa, Geobacillus stearothermophilus
MKRIGVLTSGGDSPGMNAAIRSVVRKAIYHGVEVYGVYHGYAGLIAGNIKKLEVGDVGDIIHRGGTILYTARCPEFKTEEGQKKGIEQLKKHGIEGLVVIGGDGSYQGAKKLTEHGFPCVGVPGTIDNDIPGTDFTIGFDTALNTVIDAIDKIRDTATSHERTWVIEVMGRHAGDIALYSGLAGGAETILIPEADYDMNDVIARLKRGHERGKKHSIIIVAEGVGSGVDFGRQIQEATGFETRVTVLGHVQRGGSPTAFDRVLASRLGARAVELLLEGKGGRCVGIQNNQLVDHDIAEALANKHTIDQRMYALSKELSI

SEQ ID NO: 11719 - protein, 409 aa, Zea mays
  misc_feature (7)..(7): Xaa can be any naturally occurring amino acid
QVIVVTXGERILGLGDLGCQGMGIPVGKLALYTALGGVRPSACLPITIDVGTNNEDLLKDEFYIGLKQRRATGQEYSEFLDEFMAAVRQNYGQKVLVQFEDFANHNAFTLLEKYRTNHLVFNDDIQGTAAVVLAGIIAALKSVGGTLADHTFLFFGAGEAGTGIAELVALEISRQANVSVEEARKKIWLVDSKGLIVASREETLQPFKKRYAHEHEPVKDLLGAVKAIRPTALIGSAGVGQSFTKEVIEVMSSINERPIVLALSNPTSQSECTAEQAYTWSQGRAIFGSGSPFDPVKYNDKLFVPAQANNAYIFPGFGLGVVISGAVRVSDDMVLAAAEALAEQVTPEHIEKGLIYPPFSIIRKISANIAAHVAAKAYDLGMATQLPRPKDLVKYAESCMYSPVYRSYR

SEQ ID NO: 11720 - protein, 136 aa, Methanopyrus kandleri AV19
MDVAVKKVEVRQLKKGKYIMIDDEPCKIVEYTTSSPGKHGSAKARIVAVGLFDGKKRTLTKPVDAKVDVPVIERKTAQVVSDMGDTVQLMDMETYETFEVQKPEDEELASQLEPGTMVEYMEAAGKRKIVGIKEEE

SEQ ID NO: 11721 - protein, 122 aa, Candidatus Carsonella ruddii
MIQEQTYLKVADNSGGKVVKCIKVLNGTNKKYANIGEIIKVVVKTANFKSKIKKSQVLKAMIIRSKTGIKRLDGTIIKFNDNSVILLNNNEQIISTRVFGIILRELKNEKFAKLISLSNEII

SEQ ID NO: 11722 - protein, 254 aa, Brassica rapa subsp. rapa
MGRGRVEMKRIENKINRQVTFSKRRAGLLKKAHEISILCDAEVSLIVFSHKGKLFEYSSESCMEKVLERYERYSYAEKQLKAPDSHVNAQTNWSMEYSRLKAKIELLERNQRHYLGEDLESISIKELQNLEQQLDTSLKHIRSRKNQLMHESLNHLQRKEKEILEENSMLTKQIKERESILRTHQNQSEQQNRSHHVAPQPQPQLNPYMISHQASPFLNMGGMYQGEDPTAVRRNRLDLTLEPIYNCNLGYFAA

SEQ ID NO: 11723 - protein, 491 aa, Sinorhizobium meliloti 1021
MALTPALTRHIRRPKIFASLDEVTRSSGQPAGPVFDVSNPSTGELLATLPDMGIDDARTAIDAAALAQPLWAGKPAKDRSIILRRWHDLIVEHADDLAAILTAEMGKPVGEAKGEVLHAASYVEWYAEEAKRVYGETFPAPANDRRMLVIKQPVGVVGTITPWNFPASMVARKISPALAAGCTIVLKPAEQTPLVAGAMFVLAEKAGFPEGVLNLLYASEGAPIGRELCGNPKVRKISFTGSTEVGRLLMRQCSDQIKKVSLELGGNAPFIVFDDADIDEAVDGAVQAKFRNAGQTCVSANRIYVQSAVHDAFAEKFVTRVRELTVGDGFAPDVAIGPMIDAHAIDKIEAHVADAVAKGAQVRSGGSRIGTTGTFFEPTVLTGISHDMRIAQEETFGPIAPIIRFETAEQVVAEANDTIYGLAAYFYAENLKRVWHVAEALEYGMVGINTGRMSSEAAPFGGIKQSGIGREGSRHGLEDYLEMKYLCMGNI

SEQ ID NO: 11724 - protein, 501 aa, Oryza sativa (japonica cultivar-group)
MDGRSILMGRYEVGKQLGQGTFAKVYYARNLTTGQAVAIKMINKDKVMKVGLMEQIKREISIMRLVKHPNVLQLFEVMASKSKIYFVLEYAKGGELFNKIAKEGKLSEDSARRYFHQLINAVDYCHSRGVYHRDLKPENLLLDENENLKVSDFGLSALAESKRQDGLLHTTCGTPAYVAPEVLSRKGYDGAKADVWSCGVILFVLVAGYLPFHDPNLIEMYRKICRADFRCPRYFSAELKDLIHKILDSDPSTRISIPRIKRSTWYRKPVEINAKNSEAATTNSISSGVATTSGSAECSTSEENQGSLSLPNLNAFDIISLSTGFNLSGFFEDTHGHQEERFTTRQPVTTVLGKLKELAKRLKLKVKKKDNGVLRLAAPKEGKKGFLELDAEIFEVTPSFLLVELKKTNGDTMEYRKLVKEDIRPALKDIVWVWQGDEHLNSQSILQGEQQQSPLPPELPQDQLQPSLPQQEKQDMPEPPLLPQVPQEEVQTSIPAEQTKN

SEQ ID NO: 11725 - protein, 284 aa, Schizosaccharomyces pombe
MLIAAMGPKIPVPAYGVGTALFKKEKGEINRTIVDSVKNALAAGFIHIDCAEVYGNEEEVGVALKEANVPRSKLFITSKVMHNVDNIPEALNESLRKLGTDYLDLYLLHSPIPFYEKKIPISEGWKAMETALGTGLVHSVGVSNFRIPDLEELLKTSTITPRVNQIEFHPQVYKAAKPLVEFCQSKGIIVEGYGPLSPLVRDAQGPVAEFTKSLESKYHVSDTQILLKWAYSKGVIPITTTSKIERMKECLNFDSFTLDKADIDELGTLGVQHHKRTFMKHMDE

SEQ ID NO: 11726 - protein, 280 aa, Listeria innocua Clip11262
MTLSFSDTYRLNNGIEMPRHGFGVYKLTDEQRMRTALETAVDVGYRLFDTASFYHNEKELGDFFASSGLKRDEFFVTTKMWNTEQGYDETLRAFEKSQKKLQLDQVDLYLVHWPKQDTFFETWRAVEKLYDEGLVRAIGVSNFEAHHLDRLRTSANVLPVVDQLETHPHFPNQLLHRYLEELHIVHQAWSPLGRGGVLQEQILIDLAKKHGKSPAQIVLRWHLQNNISIIPKSETPSRIRENADIYDFELTEADMRQVERLNNGERVSHAPDVMYVRSEI

SEQ ID NO: 11727 - protein, 296 aa, Euglena gracilis
RSYMEKYAKDEVAYFRDFATAYQRLAELGVPELPVPWDEIRADVAALVAEKGCAPILIRLAWHDAGTYDQQSNTGGPRAVMRFPGGEAEHGSNNGLDIARGLLQPIVDKYSWVSTADLWAFASVVATEVSGGPKIPFRPGRRDAVTAKEAVERGRLPDATQTTNHLRDVFYRMGMTDEEIVALSGAHTMGRCHAERSGFEGPWTDNPLVFDNSYFKLLLERKWTAVTNSVGNLQFQDETGTLMMLTSDLALLMDPSFRKHVERFAADQDAFFRVYAGAYQKLTEGGCPFSKGAVPL

SEQ ID NO: 11728 - protein, 380 aa, Lactococcus lactis subsp. lactis bv. diacetylactis
MVDFNKVLDLHELHTGVLDIQADIDVKKPSDLAEAYTPGVAELSKLIQSDPEAKRKYTMSGKLVAVVTDGTAVLGLGNMGPAGGLPIVEGKALLYKELAGVDAIPIAVEQIGAEKIIETIKNISQSFAGIHLEDISAPQCFEIEERLSKNLNIPVYHDDQAGTAIVVLAGLMNAAKLVNKKLEDLKIVINGVGAAGVATGRLFAEVGIKNVTLIDIEGKVNDKVKSYNRYQLELAKRFNRVAGTTLDEVIDGQDVFIGLSDAKVLTGTQVERMAKDAIIFALANPVPEILPEEALKHGAAVVATGSNQWPNQVNNVLVFPGLFKGLLSANVQHVDYKLQANIATAIADVIKNPDRNHIVPGVFDAGVVESVTKAVKDSAK

SEQ ID NO: 11729 - protein, 301 aa, Zea mays
  misc_feature (6)..(6): Xaa can be any naturally occurring amino acid
RLFYKXLLIDNVEELLPVVYTPTVGEACHKYGSIYRRPQGLYISLKDKGKILEVLKNWPERSIQVIVVTDGERILGLGDLGCQGMGIPVGKLSLYTALGGVRPSAVEGATPDRLAFWECWPKRPKARCYACGRVCRGPTTWMGAPFVRAAPTDTSCVGGPCLPITIDVGTNNEALLNDDFYIGLRQRRATGEEYHELVEEFMAAVKQNYGEKVLTQFEDFANHNAFDLLEKYRESHLVFNDDIQGTASVVLAGLLAALKAGTGIAELIALEMSKHTGSPIEECRPKIWLMDSRGLIVASRK

SEQ ID NO: 11730 - protein, 314 aa, Glycine max
MMASPTSPRVLFLSLFVTLSMILHLSSARKLSESDPQLQFQYHRGPLLTGKISVNLIWYGKFKPSQKAIVADFITSLSSSKPLTAQPSVATWWKATDKYYKNSFPKLALSLGSQIVDENYSLGKSLTTNQILKLASKGPQRNAINIVLTSAEVAVEGFCSSRCGTHGSSVGARVNGKRYKFAYMWVGNSETQCPGQCAWPFHQPIYGPQNPAPLVAPNNDVGLDGMVINVASLLAGTVTNPFGNGYFQGPKEAPLEAGSACTGVYGKGAYPGYAGNLLVDPTTGASYNANGVNGRKYLLPALVDPKTSSCSTLV

SEQ ID NO: 11731 - protein, 475 aa, Oryza sativa (japonica cultivar-group)
MGNCFGSEEAEAAATVRAPAQGHHGRRQDSDQISNLAAEAAAPANRRSPIMAPPKALASMSSAAGHHSGMRSSSSMSSITTRSSSSSSNLPLGAAGGADVGVAGALYPEPEGRILEVPNLRIFTFAELRAATRNFKPDSVLGEGGFGRVYKGWVDERTMSPARSGTGMVIAVKKLNPESVQGLQEWQSEINFLGRLSHPNLVRLIGYCVEDRELLLVYEFMAKGSLENHLFRKGSAYQPISWNLCLRIAIGAARGLAFLHSSERQIIYRDFKASNILLDTHYNAKLSDFGLAKNGPTAGESHVTTRVMGTYGYAAPEYVATGHLYVKSDVYGFGVVLLEMLTGMRALDTGRPAPQHSLVEWAKPYLADRRKLARLVDPRLEGQYPSRAAQQAAQLTLRCLSGDPRSRPSMAEVVQALVEIERIRSRPKAASSREDASPRVPTRSGGHGHHHHHHSSRPRSGSDGARSGYPSPRVR

SEQ ID NO: 11732 - protein, 1090 aa, Ustilago maydis 521
MSSSTSAAIPPQANSDESNPLRTPPPPSSSTSSSSSSLSASTVSTPTPLAAGATSSSAVQSASASSPDPAVAFIPTPSSSSAPVTAQVSPPKITPATPSSSFSPPPPSSSSPSATVSVSSSPPTSSTIHHATVSDPTTEDIDMAVSTVSHPAPDLVLTDLGASSKRITPLASATIPHNSPQLEGTPLNPSQQQLALDALVPASALSTSSQPFSPISNSPQPMQPTKSSPATPTSLVKHSELTPSPRDRSAASGSASSSTPASSTTPALPPKVAPVMAGMGTLPPNVPPPSASASASTSAFSASDTLRAIPTNKNNPAFLNKLRSMVDDPNTDELIRWSPDGASFFVPNHVRFGDQVLPRFFKHNRFSSFVRQLNMYGFHKVPHLQQGALKHDSPQESELWEFSNPHFHRDHPDWLSKVQRKKGPRDDKDNHADREASATTGQELMHAGALMRTDFGMNNLGADANADGALQLASVLNAINAIKNAQTSISADLRHLQNSNQNLWQEAVESRQRAKRQQETINKILRFLAGVFGNQEDTETPVPGKKVSGKARAGKRVGVRPQQQQQQQQQHQQHQQQRSKSRLMIEDGNASSSSSHRGIQGLDLPLDQEEIEEMPYHLRFQEASNSDSPKVQSPSANLGASRFTQIGSPPSSSSAADFGRQLSEAVSTPGGSRRLSSQASNQVLNALASGEGNAWLASLFGASLANQGSKSTGPASGGGLKLDPHMVAALQQALASAGGVNSASDNTGDYFGSTTGAPADDGSSRFSAFPSSSSNASAVSSSNSAQANALGLDADALARFGASISHALVQSPARPNPNAGASNTQPTNYSVTSPSKGGSANLFDMGNDEVTSSGNNNQQLALSLSRATRDLQNTSSDVDQVQSSINSLIQGLQGIAGQAPASASASASDRAAVVPWQTTSGAAFDAAPATFGDASGSASVGNQFEAPSGTTPPSSTVDVGATSGTNAGMDDFDVDSFLSQFVDSSQAPGGGVTSPTPNNAYGESPSFAFSPATTAAFLHGAATSASDLPYAQQLTSKAESGTSSNSSSSRLNGKADSNAPKKRKPSTSGVELAVDVDMPDRPLKKSGRKA

SEQ ID NO: 11733 - protein, 339 aa, Oryza sativa (japonica cultivar-group)
MDAAAAAVSTLSALAVFASTLDHGAVRSVHGYKVYGRGGRRRWERWVEREFVLTPASCREVPAPVAPPRILPAEWRGRPAYREGQVVAAGAWRCILAFDSAAAPPRTPPPVLSPFLNPRLMCVPSLYNDLEKVFRFQNVEKIPKLMQCDSEEKLSSWDARDKSSDEVHASESDSDDDLQSGEEEKPTVQKQRRANKKHIASITLVDIAQYFHLPIREASRTLKIGVSILKRKCRQYNIPRWPHRKIKSLDSLIQDLEYVIDDGDDHDDTGDDVQQEKHKQTAEEKQEAIMALTRRKQMLETEKETIQQIPAMDLKVETKQFREDVFKRRYRAKKDLAND

SEQ ID NO: 11734 - protein, 167 aa, Saccharomyces cerevisiae
MQEFYSFSPIDENGNPFPFNSLRNKVVLIVNVASHCAFTPQYKELEYLYEKYKSHGLVIVAFPCGQFGNQEFEKDKEINKFCQDKYGVTFPILHKIRCNGQKQDPVYKFLKNSVSGKSGIKMIKWNFEKFVVDRNGKVVKRFSCMTRPLELCPIIEELLNQPPEEQI

SEQ ID NO: 11735 - protein, 428 aa, Pseudomonas aeruginosa
MADKKAQLIIEGSAPVELPVLSGTMGPDVVDVRGLTATGHFTFDPGFMSTASCESKITYIDGDKGVLLHRGYPIEQLAEKSDYLETCYLLLNGELPTAAQKEQFVGTIKNHTMVHEQLKTFFNGFRRDAHPMAVMCGVIGALSAFYHDSLDITNPKHREVSAHRLIAKMPTIAAMVYKYSKGEPMMYPRNDLNYAENFLHMMFNTPCETKPISPVLAKAMDRIFILHADHEQNASTSTVRLAGSSGANPFACIASGIAALWGPAHGGANEAVLRMLDEIGDVSNIDKFVEKAKDKNDPFKLMGFGHRVYKNFDPRAKVMKQTCDEVLQELGINDPQLELAMKLEEIARHDPYFVERNLYPNVDFYSGIILKAIGIPTSMFTVIFALARTVGWISHWQEMLSGPYKIGRPRQLYTGHTQRDFTALKDRG

SEQ ID NO: 11736 - protein, 379 aa, Psychrobacter sp. 273-4
MAAQNQSTKVLSGAGLRGQVAGKTALSTVGKSGSGLTYRGYDVSELADKCIFEEVAYLLLYGNLPTQSELDAYQTKLKGLRGLPQSLKEVLERIPAAAHPMDVLRTGCSMLGNLETEISFDEENDQADRMLAAFPSIINYWYRFSHDNVRIETETDDETIGGHFLHLLKGEKPNELHTKVMNVSLILYAEHEFNASTFTARVCASTLSDIHSCITGAIGSLRGHLHGGANEAAMDMIEGFSSPDEAESEMMAMLARKDKIMGFGHAIYSESDPRNVVIKGWAEKLAADVGDDVLYPVSVRCEEVMWREKKLFCNADFFHASAYHFMGIPTKLFTPIFVCSRLTGWAAHVFEQRANNRIIRPSAEYTGEELRPVPDMSAR

SEQ ID NO: 11737 - protein, 589 aa, Zea mays
  misc_feature (559)..(559): Xaa can be any naturally occurring amino acid
  misc_feature (572)..(572): Xaa can be any naturally occurring amino acid
MCGILAVLGCSDWSQAKRARILACSRRLKHRGPDWSGLYQHEGNFLAQQRLAVVSPLSGDQPLFNEDRTVVVVANGEIYNHKNVRKQFTGTHNFSTGSDCEVIIPLYEKYGENFVDMLDGVFAFVLYDTRDRTYVAARDAIGVNPLYIGWGSDGSVWIASEMKALNEDCVRFEIFPPGHLYSSAGGGFRRWYTPHWFQEQVPRTPYQPLVLREAFEKAVIKRLMTDVPFGVLLSGGLDSSLVASVTKRHLVETEAAEKFGTELHSFVVGLEGSPDLKAAREVADYLGTIHHEFHFTVQDGIDAIEEVIYHDETYDVTTIRASTPMFLMARKIKSLGVKMVLSGEGSDELLGGYLYFHFAPNKEELHRETCRKVKALHQYDCLRANKATSAWGLEVRVPFLDKEFINVAMGMDPEWKMYDKNLGRIEKWVMRKAFDDDEHPYHPQHILYRQKEQFSDGVGYNWIDGLKSFTEQQVTDEMMNNAAQMFPYNTPVNKEAYYYRMIFERLFPQDSARETVPWGPSIACSTPAAIEWVEQWKASNDPSGRFISSHDSTAIDHTXAVSRRWPTAAATXAANGTVNGKDVAVAIAV

SEQ ID NO: 11738 - protein, 453 aa, Geobacter sulfurreducens PCA
MPDYDTQTLRDWDRRHIWHPFTQMKEWEESEPVVIVEGEGSWIIDSEGKRYLDGVAAIWTNVHGHCRREINEALKAQVDRLEHSTLLGLTNDRAVVLAKRLAEIAPPGLCKVFYSDNGSTAVEVGVKMAFQFWRHEGKPEKSRFISFTSAYHGDTLGAVSVGGIDLFHGVFRPLLFPTIQAPAPYCYRCPMGRDTPAACGMECLTELERIMESHAGEVAGLVIEPLVQGAGGMIVQPEGFLKGVRELCDRHDILMIADEVAVGFGRTGAMFACGREGITPDIMALSKGITAGYMPLAATLATQQVYDAFLGEYREMKTFFHGHTFTGNPLGCAVALASLDLFESDRLLGKLPNKIKLLQEKLKGLIELEHVGDVRQCGMIAAVELVRDRATKEPFDWEERVGVRVCLEARTHGVFLRPLGNVIVIFPPLAITAEEIDFLVDGLEKSIHTVTGG

SEQ ID NO: 11739 - protein, 394 aa, Zea mays
MALSIYTPTSSSLVPPSIQEVRLTSRPPKPATFSLRRPHLAARAAAGNAPTSPVREVVTELDAVAGFSEIVPDTVVFDDFERFAPTAATVSSSLLLGITGLPDTKFKSAIDTALADGECNALEKAEDRMSCYLTKALANVGAELAHQVPGRVSTEIDARLAYDTQGIIHRVHELLNLYNQHDVSTDRLLFKIPATWQGIEASRLLESEGIQTHLTFVYSFAQAAAAAQAGASVVQMFVGRLRDWARHHSGDPEIDEALKNGEDAGLSLAKKVYAYIHRNGYKTKLMAAAIRNKQDVFSLLGIDYIIAPLKILQSLEESVTDPDVKYGYVPKLTPAIGKTYNFTEEELVKWDQLSLSAAMGPAAEELLASGLEGYVNQARRVEELFGKIWPPPNV

SEQ ID NO: 11740 - protein, 482 aa, Streptomyces avermitilis MA-4680
MSILNDVPKQLFIGGTWADAADGATMPVDDPATGEILCHVADAGPKDARLAADAAVEAQDGWARTAPRERSEILRRAYEIIVSRTGELALLMTSEMGKPLAEARGEVAYAAEFFRWFSEEAVRIDGGYGVLPDGRNRMLLMRRPVGPCLLVTPWNFPLAMGTRKIGPAIAAGCTMVLKPAPQTPLSSLALAGILKEAGLPDGVLNVVTTSRAGEVVEPLLTGGRIRKLSFTGSTRVGRLLLAQCADAVVRTSMELGGNAPFIVLDDADLSAAVDGAMTAKMRNMGEACTAANRFFVHRSVADEFGRRLAERMGALVVGPGTRDGVDVGPLIDEAGRAKVEELVADAVERGARVLVGGVAPDGPGRFYPPTVLADVDPGSRLMETEIFGPVAAILVFDDEDEVVRRANDTPWGLVGYVFTQGLDRALRVSERLEVGMVGVNTGLVSNPAAPFGGVKQSGLGREGGRVGIEEFLEYKYLAVPLR

SEQ ID NO: 11741 - protein, 441 aa, Glycine max
  misc_feature (130)..(130): Xaa can be any naturally occurring amino acid
MSGMKVAKGRILVGKYELGKTIGEGSFAKVKFARNVQNGNYVAIKILDRKHVLRLNMMEQLKKEISTMKLINHPNVVRIHEVLASKTKIYIVLELVDGGELFNKIAKNGKLKEDEARRYFHQLINAVDYXCHSRGVYHRDLQPENLLLDSNAILKVTDFGLSTYAQQEDELLRTACGTPNYVAPEVLNDRGYVGSTSDIWSCGVILFVLMAGYLPFDEPNHATLYQKIGRAQFTCPSWFSPEAKKLLKRILDPNPLTRIKIPELLEDEWFKKGYKPTTFVEEEDVNVDDVAAAFNDSKENLVTERKEKPVSMNAFELISRSQSFNLENLFEKQTQGLVKRETHFTSQRPANEIMSKIEEAAKPLGFNVHKRNYKMKLQGDKSGRKGHLSVATEVFEVAPSLHMVELRKTGGDTLEFHKFYKNFSSSSGLQDIVWHDTEGKK

SEQ ID NO: 11742 - protein, 44 aa, Triticum aestivum
MSDTDEHHFLSKADSGAFKTYPHQAVAIRKGGHIVINARPCKVV

SEQ ID NO: 11743 - protein, 302 aa, Triticum aestivum
  misc_feature (29)..(29): Xaa can be any naturally occurring amino acid
  misc_feature (71)..(71): Xaa can be any naturally occurring amino acid
  misc_feature (200)..(200): Xaa can be any naturally occurring amino acid
MDSLSPVRGSPCFPAGFPGNLFPFALFLXSPVPTFKRILKAKSTEQFDGLPYLLSLLNCFICLWYGLPWVXDGRLLVATVNGTGAAFQLAYISLFFIYADSRKTRLRMVGLLALLVCAFALVAHASIAFFDQPTRQQFVGAVSMASLISMFASPLAVMGVVIRTECVEFMPFYLSLSTLLMSASFAVYGVLLRDLFIYLXTGLELSWEQRSWHSTLTTAGNGDARIHLRRCLPDQTSSDQFSVLAWLERAGVGFCRRELYAPALFSLVDAESACTDLLAYASVYMLLKCHSFKKKKKAAALR

SEQ ID NO: 11744 - protein, 472 aa, Triticum aestivum
MVPREHGDEAIVADGHGKEEEVGVMGVSSGGADGDEEQHGGGGGKFSVTSFLWHGGSVWDAWFSCASNQVAQVLLTLPYSFSQLGMLSGILLQLFYGFLGSWTAYLISVLYVEYRSRKEKEGVSFKNHVIQWFEVLDGLLGPYWKAAGLAFNCTFLLPRARVQLRARASNIYYINDRLDKRTWTYIFGACCATTVFIPSFHNYRIWSFLGLGMTTYTAWYLTIAAAVHGQVPGAKHSGPNSLMLYFTGATNILYTFGGHAVTVEIMHAMWKPRKFKYIYLVATLYVFTLTLPSASTMYWAFGDALLTHSNAFSLLPKSGWRDAAVILMLIHQFITFGFACTPLYFVWEKAIGMHHTGRVLRRALARLPLVLPIWFLAIVFPFFGPINSAVGALLVSFTVYVIPALAHMITYRSAHARENAVEQPPRFVGRWTGTYVINAFVVVWVLVVGFGFGGWASITNFLRHHRHHSHRL

SEQ ID NO: 11745 - protein, 219 aa, Candida albicans SC5314
MSSDKSNLLKKYKIVFLGDQSVGKTSLITRFMYDTFDETYAATIGIDFLSKTMYLEEGKTIRLQLWDTAGQERFRSLIPSYIRDSHVAVICYDITNKKSFDNLDKWIKDVKLERGDDVIIVLVGNKSDLASDKRQVSLDDVENLQIKIGAKFFIETSTKANHNVKLLFKKIAQSLPDFNQDSNDKSNDNNNNNNNNQSETIDITIDNTAPNPQGTSTCC

SEQ ID NO: 11746 - protein, 499 aa, Methanococcoides burtonii DSM 6242
MVDKCSNYMGRIAGFFNLSPSSISQIRIFNEMEVRGEYEAIIYTGDTIHNVHSASEIQFISLNDAMIGFDSLKASSPLSSSSDKFELVGDIDIYNSDEFACEFHCGNVENMSILTRFLQDTFGLEKCSDDEMFQRFDSSLKAIRGVYAIACHIGDKVFLARDLIGVKSLWYDVSSGFAFASEKKFLEMAGLHEVVELDPRHILCYDFENDIIKSYDREFLQGLAEHQGSFVEIRNGFLSLLKEAVSKRVPDEDFGVMFSAGIDSTILALLCKGFAEAKGVKCNYYTVGLSGQVPSPDIACARKLADELELELNVHEIGLDTVEEYLSTVVPLIEDATVPKTGVALTMYAACRAAKEDGINVLFAGAGADELFAGYNRFKSSESVNEDCIRDIMEMHKVNTYRDDTVAAFTGTIVRYPYLDENFVEYALAIPKEYKISDEMNKIVLRKAGEELGLPKYVVERGKKAAQYGSSFDQALKKLAKRAGFANKTDYINSFQERR

SEQ ID NO: 11747 - protein, 534 aa, Glycine max
NSARVQSLVSHLRLIVLLLSVSLGNSASLQENFVQCLNLNSDRTFPFYSSIYTPKSPSFTSILDSSAQNLRLLVPSTPKPEFIFTPSRDSHVQAAVICSKKLGIHIRVRSGGHDYEGISYVSEIESPFIVVDLVKLRGIDVDVKSNTAWVQAGATTGEFYYRIYEKSSVHGFPAGLCTSLGIGGHITGGAYGAMMRKYGLGVDNVLDAKIVDANGRILDREAMGEDLFWAIRGGGGGSFGILLWWKIKLVSVPPTVTVFTVTKTLEQGATKILHKWQEVAPYIDENLFIRVIIQPSSDARNKTQRTIATSYNALFLGGARTLLQVMKTSFPELGLTIKDCLETSWIKSVLYIAGFPSDTPPEVLLKGKSTFKNFFKAKSDFVREPIPETGLEGLWQRLLVEDSPLMIWNPYGGRMSQFSESETPFPHRNGTLYKIQYLSLWQEGDKNAAKHIDWIRKLYNYMGPYVSSLPREAYVNYRDLDLGINTKNSTSYIQASAWGYRYYKNNFDRLVKIKTKVDPENVFRHEQSIPPLPL

SEQ ID NO: 11748 - protein, 320 aa, Candidatus Blochmannia floridanus
MIKKIGVLTSGGDSPGMNAAIRGVVRAGLSEGIEVYGIYDGYLGLFQNRMMLLSYCSVSDIINKGGTVLGSSRFPELKKDMIRSVVMNNISKSHLDALVIIGGDGSYIGARRLSDLGCPCIGIPGTIDNDVAGTDYTIGYFTALETIIEAIDRLRDTSSSHQRISIVEVMGRYCGDLTISAAIAGGCEFVIIPELKFQMQDLVDKIKLNISKGKKHAIVAITERICNVFDLAQYIENETGKETRATVLGHIQRGGKPVAYDRILASRMGAYSIELLLKGYGRHCIGIENEKLVHHDINDATKYMRRSFRQDLLTTAKKLC

SEQ ID NO: 11749 - protein, 250 aa, Brassica napus
MTKSYPTVSEDYQNAIEKCKRKLRGLIAEKNCAPIMVRLAWHSAGTFDCASRTGGPFGTMRFDAEQGHGANSGIHIALRLLEPIREQFPTISFADFHQLAGVVAVEVTGGPEIPFHPGREDKPQPPPEGRLPDATKGCDHLRQVFTKQMGLSDKDIVALSGAHTLGRCHKDRAGFEGAWTSNPLIFDNSYFKELLSGEKEGLLQLVSDKALLDDPVFRPLVEKYADDEEAFFADYAEAHLKLSELGFADA

SEQ ID NO: 11750 - protein, 439 aa, Ustilago maydis 521
MESQLANLHLDGGSTADLKQGSRPSHAQASHGNRHVHPTNSSLRPLAPSSSIASNMGINMGVNMQHFNRLAASSTGLTNPNSIAQGMSRAAQQPLNGSRPSTQQQPTQAHIKSRPPSVAGGLNAAAGPSYRPAAPAAQSTKQPASAGSAVASVDLGRYDGGLERDEARGRRGTMQFDPLTLSSADAGKQHPPTRVWSLKDFEMGRPLGKGKFGRVYMVRTRAAPNKGYIIALKCMYKNELVENKVEKQLRREIEIQMNLRHPHILRLHGYFHDEGRVFLMIEFAGRGELYKLMNKLHDRRFEEKVAATYIAQMADALSYLHSKHVIHRDIKPENLLLGIKGDLKIGDFGWSVHAPGNRRQTLCGTLDYLPPEMVNGEQHDKAVDLWALGVLCYEFLEGVPPFEELENAPAGTYKRINNIDFKIPRHFSPEAADLTTGYP

SEQ ID NO: 11751 - protein, 143 aa, Zea mays
MAMAYKMATEGMDVKEECQRWFMEMKWKKVHRFVVYRIDERSRAVLVDRVGGPGEGYEELVAALPGDDCRYAVFDFDFVSVDNCQKSKIFFIAWSPAASRIRAKILYATSKQGLRRLLDGVHYEVQATDPSEMGFDVIRGRAQ

SEQ ID NO: 11752 - protein, 488 aa, Glycine max
  misc_feature (342)..(342): Xaa can be any naturally occurring amino acid
MESRFKSNPQLRRGLCCANDDKQQERSPSVIVIGGGMAGIAAARALQDASFQVILLESRERPGGRIHTDYSFGFPVDLGASWLHGVCPENPLAPLIGKLGLPLYRTSEDNSVLYDHDLESYALFDMDGNQVPQELVTKIGKIFGAILEETNNVREEFSEDMSILRALSIVFERKPELRLEGLSHKVLQWYLCRMEGWFATDADTISLKCWDQEVLLPGGHGLMVRGYQPVINTLAKGLDIRLGHRVTKIVRQYNEVKVTVENGKTFVADAAIVAVPLGVLKAKSIKFEPKLPDWKEAAISDIGVGIENKIILHFKNVFWPNVEFLGVVAETSYGCSYFLNLXHKAMGRPVLVYMPAGQLAKDIEKMSDEAAANFAFMQLKKILPDASSPIQYLVSRWGTDINTLGSYSYDAVGKPHDLYEKLRVPVDNLFFAGEATSMLYTGSVHGAYSTGMMAAEDCRMRVLERYGELDLFPPVGDVSVIPLQISRL

SEQ ID NO: 11753 - protein, 358 aa, Triticum aestivum
  misc_feature (235)..(235): Xaa can be any naturally occurring amino acid
  misc_feature (325)..(325): Xaa can be any naturally occurring amino acid
MAGEGGSGGERGKDPLEGVRAIVLKPSESLDESRFTKIAGADFNDAGLGLDGLLGSLASTGFQASNLGDAIDVVNQMLDWRLSHEKPTEDCDEAELDPKYRESVKCKIFLGFTSVDVIVTTAGGIEEDLIKCLAPTYRGEFSLPGALLRSKGLNRIGNLLVPNDNYCKFENWIMPLFDQMLQEQSTENVWTPSKVIARLGKEINDESSYLYWAYKNNIPVYCPALTDGSLGDMLXCHAVRNPGLIIDIVQDIRLINGEAIHASPRKTGAIILGGGLPKHHICNANMFRNGADYAVYINTAQEFDGSDSGAQPDEAVSWGKIKGSXAKPVKVHCDATIAPTLLVAATFARRSHGANSTN

SEQ ID NO: 11754 - protein, 386 aa, Magnetospirillum magnetotacticum MS-1
MIDTTVHSASPGFEHKEDLESGTRAAAQAGVVAIFEMPNTKPSTTTADAILDKLARAKGRAWVDHAFFIGAASDNVDHLAQWERIPGCAGIKVFMGSSTGNLLVADDETLGRVLAQGFRRVAVHCEDEGRLIERKHVAEEGAHPRVHHLWRDEETALMASKRLIALAETARRRVHVLHVTTAEEMEFLAGHKDVATVETTPQHLTLAAPECYERLGTYAQMNPPIRGTRHRDALWKAIADGTVDVLGSDHAPHTREEKDKPYPQSPSGMTGVQTLVPLMLDHVNQGRLSLERLVDLTSAGPARIYNIAGKGRIAVGYDADFTIVDMKAERIITNDWIESRCGWTPFDGRKVTGWPVATIVRGSTVMRDGQLLGQASGEPVRFQECP

SEQ ID NO: 11755 - protein, 217 aa, Cryptomeria japonica
MVRGKVNLQRIQNPVNRRVTFSKRKAGLLKKAGELSVLCEAEICSIIFSPTGKLFEFASHSMNRIIGKYKKNCASIGHHIQLQEHLETLRMELENLRIETTHLEKTCKHMNGEDLDFLNFKELQKLEKKMSLSARKIHLRKDKILVENVGSLKSKEKLLELENAEMDKKIGRSHKACHLNINMMDEVNSKLETEASTRQDCLKLTLISRNFHDDNFC

SEQ ID NO: 11756 - protein, 504 aa, Sphingomonas sp. LB126
MMESTGNAAIFEQARARIARPFGHFINGLWEAGSGEPIAVVNPATEQPIGSIAAGGEAEVDRAVAAARQRFESAEWTRMPAAERERLLLRLADLVERDRDELAAIETLDNGMPFAPARMMAVGSAISAIRYNAGWARRMTGEEAPVSVPGRWHGYTSREPLGVAALIVPWNAPFAITCNKVSAALAAGCTVVLKPAELAPMSGLRLAELVQEAGFPDGCLNVVTGLGAQAGAALVRHPGVDKISFTGSTATGQSILRETAGRLTRVSLELGGKSAVLVFPDADLEKAIPAVAMGIFGNSGQVCAAGSRLFLHDSVFDRFVTGLVDFAEKLMVGPGDQPGVALGPLISAGQKERVMGYIAAGEAEGAQIATRGSAPDEPGYFVKPTIFVDTRPDMRIVREEIFGPVLSVMRFSDDNLENLARQANDSIYGLSAYVWTRDLSTAHAMARYLRAGSVKVNGSGMEFALPFGGFKQSGIGRENGPRGGGSLYRKEVGNDRLVMVWTAL

SEQ ID NO: 11757 - protein, 96 aa, Glycine max
  misc_feature (31)..(31): Xaa can be any naturally occurring amino acid
PEYGVHLGLAANNNSPSRSNPQAHAENLICXGANTHSNAQNTAGVITMAREGVRDFDTPTKELSPILACKPGLNIRGETNLASGIQAAQQAIKSLR

SEQ ID NO: 11758 - protein, 372 aa, Zea mays
  misc_feature (26)..(26): Xaa can be any naturally occurring amino acid
  misc_feature (34)..(34): Xaa can be any naturally occurring amino acid
  misc_feature (231)..(231): Xaa can be any naturally occurring amino acid
RVSQGKPDEIEESISMVEILAVQLAXREAELLLXKEEFTKFAKSLKQASEDAKRIVEEERANAHTEIETAKGAVQRVQQAVQEHEKMSQNTGKQDMEELKKEVREARRIKMLHQPSKAMDLENEIRILRNTFAEKSKDCVSLLKELEMHKRLKENGTIPSFDLEGLQCLGSMLRIVGLSGTHMDLSNISIQWFRIHPKESNKEIISGATRPVYALEPHDVRRYLQAEIDCXGEIAVAKTAGPVDPVAGLVDYVETLVRKPETEFNVVVLQLNGIDLPKESVHVLNVGRLRMRLTKGKSVVPKEFYSSSMQLCGVRGGGEAASQAMFWRPRNDLSLVLAFESTRERNTAIMLARRFAVDCNIILAGPGDKTPW

SEQ ID NO: 11759 - protein, 501 aa, Chorispora bungeana
MAIPMPTRQLFIDGEWREPILKKRIPIVNPATEEVIGDIPAATTEDVEVAVNAARRAFSRNKGKDWAKAPGALRAKHLRAIAAKVTERKSDLAKLEALDCGKPLDEAVWDMEDVAGCFEFYADLAEGLDAKQKAPVSLPMENFKSYVLKQPIGVVGLITPWNYPLLMAVWKVAPSLAAGCTAILKPSELASVTCLELADICREVGLPPGVLNVLTGYGAEAGGPLASHPGVDKIAFTGSFATGSKVMTAAAQLVKPVSMELGGKSPLIVFDDVDLDKAAEWALFGCFWTNGQICSATSRLLVHENIAPQFIEKLVKWSKNIKISDPMEEGCRLGPVVSQGQYEKILKFISTAKSEGATILHGGSRPEHQEKGFFIEPTIITDVTTSMQIWREEVFGPVLCVKTFGSEDEAIELANDSHYGLGAAVISNDTERCDRVSQAFEAGIVWINCSQPCFTQAPWGGVKRSGFGRELGEWGLDNYLSVKQVTLYTSNEPWGWYKSPN

SEQ ID NO: 11760 - protein, 481 aa, Burkholderia cepacia R1808
MMKIQNLIGGRHCDASTGRTFDKLAPATGDRICTVPASSADDVDRAVRAAHDALHDDAWARAGGAARARWLYRLADLVERESEALESLLAVEQGRPPAEMRMMDLPMTIDTLRYFAGWADKLEGRTIPTDGFMGRPTLSYTRRAPVGVAGQIVPWNAPLMIAVWKLAPALAAGCPVVIKPSEDAPLAVARLGKLACEAGLPAGVVNIVHGMGAEVGAALVAHPLVSKISFTGSTEVGRTIACDAARTFKRVTLELGGKAAQIVFADADLDRAIPSLVAGMFANQGQTCAAGSRVLAHRSIADALEARLADAARTIRVGPPTEAGVQMGALINPRHLARVRAHVAAALAEGAVMLAGDEQVPPRGCFMRPTILGGVHPGMRIAREEVFGPVGMVMPFETEDDAIRIANDTPFGLSASVWTQDVGTAHRVAERLDVGAVAINAWSPIDARLPWGGTRQSGIGRDLSKAALDSYLEEKIVTAAL

SEQ ID NO: 11761 - protein, 441 aa, Burkholderia cepacia R1808
MSSAAAGHTTPTVIIARGDGNYVYDVEGHRMLDGVGGLWNVNVGHNRPEVKAAIARQMDELSYYQTFDGVAHPRVYDLADRLCAMFEQEDMQRVMFGSGGSDAIETALKMARQYWVAAGEPSRTKFLSLRNGYHGVHMGGTSIGGNGVYHYNHGPLLPGCVLLDTPWLYRNPWNCDDPDQLVEHCIRQLEDTIAFHGQQTIAAFVAEPVQGAGGLIVPPASYWARVRNVCDRHGILLIADEVVTGFGRTGSMLGSRGWGVAADILCVAKGISAGYVPLGATLYNGRIAQAIEHGAGFSHVVMHGYTYSGHPLACAASLAVLDIVEAEDLPGNAARMGQRLLEQLLPLTRDFETVGDVRGKGLMLALDLVTDKASRTPLDPGKGFAARVADAARKRGVLVRAIANKIVMSPPLTLQPKETDLIAHALRDALQECCADARAIA

SEQ ID NO: 11762 - protein, 493 aa, Ralstonia solanacearum GMI1000
MALTFDQLRHTGLIRTDNLIDGRWSAGADGARYAVTDPATGSIIAQVADSSAADARAATDAAARALPAWRDTLPAERAAILRRWHAAIVANADALGRLISLEQGKPFAEGRGEVMYGASYVAWFADEATRIYGDLIPQQQRGKRMSAIKEPIGIVAAITPWNFPLAMIARKIAPALAAGCTVVAKPAEDTPLTALALAQLAQEAGLPPGVLNMIAASRERGVAAVADWLQDGRVRKITFTGSTPVGKHLARESAGTLKKLSLELGGNAPFIVFDDADLDAAIAGLLSAKFRNGGQTCVCPNRVYVQAGVYDRFAAMLAARVSALKVAPATDPDAQIGPMINARAVDKIERHVQDAVAHGARVLAGGKRLPEVGAHFYAPTVLADAHPGMALCGEETFGPVVPLFRFTDEAEAVQAANDTPFGLAAYFYSQDVRRIDRVAHALEAGIVGINEGALASEAAPFGGVKESGYGREGSKYGLDDYLSIKYLCQGGLA

SEQ ID NO: 11763 - protein, 687 aa, Zea mays
MARGLGAAPVSSCLALGAAAAVLLVAAALPSPASGVDVTAVLSAFPNFADFARLLASTPVASELSGRSSLTLLAVPNANLPQSPSAFVASAGADIADVLRYHVLLEYLSPFDLARLSPSGKLVTTLFQTTGRAPSDFGAVNLTVGGNSTVVVRSPAPSPGSNATVLGAVTAVPYNLSVLAVGGLIIPSGFDLAASESRPPPPVNITRVLTDARGFNVAASMLQASGVASEFEADEHGAGITVFVPTDDAFAGLPATDRLQSLPAERKAVVLRFHVLHSYYPLGSLEGPRRDLAVDPAAARAALVTCGGLCPGLNTVLRELVVGLQELYGVRHEVAEVVSSRDSYSKAPKSDVQCKNRIDTLKKKYKVEKAKHDSDWRYFDRLDDLLAPVLLKPNSSSSSAAAATAAAAARSAGPMVPPRINFPQRTRTPLHSSAGAKWRMPSPLPQPSASSDSSDGFPPSAVANGKRQRVEEPAAAAADNGAESSVSRAQGLRELAQAIRRLGEVYERVESAKRDQELRMERERLDSARQLEEQRVQFSTSMPRSSRITRTAQAPPGAMTTAATRTRKLRRMRKTKRKRASDCSPLQQWNAGAMFAKFSNITRVNGSIAIDTGIVQASITRTVFDQNPVAVFAVSKVLLPKEMFGRGDSGNTAMAPPSVAMAPRDAGSEKTPQTRLSSPPDLHSEDS

SEQ ID NO: 11764 - protein, 411 aa, Triticum aestivum
MGNEMSPLQKHRAEYRPELPPWLQGTAVKVEYGDAAIAADGADAHVIRRAFPHTYGQRLAHFLPKTANAPDATVITEHPAVRVGVVFSGRQSPGGHNVVWGLYNAINSHNPSSELIGFLGGTDGLFAQKTLEITEEVFSSYKNQGGYYMLGRTRDQIRTTEQVKAAMTTCQALKLDALVIIGGVTSNTDAAQLAETFAESKCSTKVVGVPVTLNGDLKNQFVETTVGFDTICKVNSQLISNVCTDALSAEKYYYFIRLMGRKASHVALECALQSHPNMVLLGEEVAASKLTISDITKQICDAVQARAEKDKYHGVVLIPEGLVESIPELYALLQEIHGLHDKGVSIENISSHLSPWASALFDFLPPFIRKQLLLHPESDDSAQLSQMETEKLLAQLVETEMNKRLEEGLTT

SEQ ID NO: 11765 - protein, 443 aa, Brassica napus
  misc_feature (22)..(22): Xaa can be any naturally occurring amino acid
  misc_feature (41)..(41): Xaa can be any naturally occurring amino acid
RKRTTPASRTRVGNYEMGRTLXEGSFAKVKYARNTVTVDIXSAAIKILDRDKILRHKMVEQLKREISTMKLIKHPNVVEIIEVMASKTKIYIVLELVNGGELFDKIAQQGKLKEDEARRYVHQLINAVDYCHSRGVIHSDLKPENLIPDANGILKVSDFGLSAFSLQVRGDGLLHTACGTPNYVAPEVLSDKGYDGAAADVWSYGIILFVLMAGYLPFDEPNLMTLYKRICKAEFSCPSWFSPGAKEVIKRILDPSPITRISIAELLEDEWFKQGYKPPSFGQDDEDITIDDVDAAFSNSKESLVTEKKAKPESMNAFELISSSNSLENLFEKQAQLVKKETRFTSQRPASEIMSKMEETAKPLGFNVRKDKYKIKMKGDKSGRKGQLSVATEVFEVAPSLHVVELRKTGGDTLEFHKFYKNFSSGLKDVVWNTDGAPEEHKA

SEQ ID NO: 11766 - protein, 116 aa, Gossypium hirsutum
MSLKLACVVVLCMVVGAPLAQGAVTCGQVTNSLAPCINYLRGSGAGAVPPGCCSGIKSLNSAAQTTPDRQAACRCIKSAAAGITGINFGLASGLPGKCGVNIPYKISPSTDCNRFV

SEQ ID NO: 11767 - protein, 372 aa, Streptococcus mutans
MAETNGLKDMIACDTRISAIKDNKLSYAGYDIADLMDNKTRFEEVIYLLWNLHLPTAIELKQFEEKLRKNYAISDAIEQCILIQSRQHLHPMSVLRSTVSLLGVYNLKAEERSVEATYDQSIQLMAKIPTIIATFARLRQGLSPIAPRKDLGFAANFLYMLNGRLPSELEILAMNRALVLHAEHELNASTFAARVCASTLSDIYSCVTTAIGTLKGPLHGGANERVFDMLREIREYGDVDSYLQEKLNSKEKIMGFGHRVYQTQDPREKYLREMARELTKGTEHDIWYQLSKKVEMCMKQKKNLIPNVDFYSATVYHVLGIDSSIFTLIFAMSRVSGWIAHIQEQQKNNKLIRPRSHYTGMRKLRYIPIERR

SEQ ID NO: 11768 - protein, 393 aa, Streptococcus mutans
MAEKVSFEEGKLQVPDKPVIPYIEGDGVGQDIWKNAQIVFDKAIAKVYGGHKQVIWREVLAGKKAYKETGNWLPNETLEIIKTHLLAIKGPLETPVGGGIRSLNVALRQELDLFACVRPVRYFKGVPSPLKHPEKTAITIFRENTEDIYAGIEWNAGTAEVQKVINFLQDDMQVKKIRFPKSSSIGIKPISIEGSQRLIRAAIEYALANNLTKVTLVHKGNIQKFTEGGFRKWGYELAKREYAAELASGQLVVDDIIADNFLQQILLKPERFDVVALTNLNGDYASDALAAQVGGIGISPGANINYQTGHAIFEATHGTAPDIAGQDLANPSSVLLSGCMLFDYIGWSKVSDLIMKAVEKAIANGQVTIDFAKELGVEALTTCQFSEVLLTYL

SEQ ID NO: 11769 - protein, 198 aa, Brassica rapa
MSASRFIKCVTVGNGAVGKTCLLISYTSNTFPTDYVPTVFDNLSANVIVDGNTINLGLWDTAGQEDYNRLRPLSYRGADVFLLAFSLVSKASYENVSKKWVPELRHYAPGVPIILVGTKLDLRDDKQFFVEHPGAVPISTAQGEELKKLIGAPAYIECSAKTQQNVKAVFDAAIKVVLQPPKNKKRKKRKSQKGCSIL

SEQ ID NO: 11770 - protein, 153 aa, Zea mays
  misc_feature (83)..(83): Xaa can be any naturally occurring amino acid
  misc_feature (117)..(117): Xaa can be any naturally occurring amino acid
MLLIVWSTTREDLSTQLSPIEAVNFQSEKMQQRKTTAAAAGRPSGTDGSDFSYRMVVDSRYTKVTKGRSRLRLLILVQATIYXLGLSCAFMTSTKNEERNTLGIASASIGLLFDSLXDFGCRRSRVNLLRLYTVPFTGGPWVFSLVFWLLGAD

SEQ ID NO: 11771 - protein, 175 aa, Triticum aestivum
MAPTVMASSVTSVVPFQGLKSTAGLPVSRRSNGASLGSVSNGGRIRCMQVWPIEGIKKFETLSYLPPLSTEALLKQVDYRIRSKWVPCLEFSKVGFIFREHNASPGYYDGRYWTMWKLPMFGCTDATQVINEVEEVKKEYPDAYVRIIGFDNMRQVQCVSFIAFKPPGCEESGKA

SEQ ID NO: 11772 - protein, 96 aa, Brassica napus
  misc_feature (91)..(92): Xaa can be any naturally occurring amino acid
MASSMLSSAAVVTSPAQAAMVAPFTGLKSSAAFPVTRKSNTDITSIASNGGRVSCMKVWPPVGKKKFETLSYLPDLTDVELAKEVDYLLRXXWIPC

SEQ ID NO: 11773 - protein, 506 aa, Zea mays
MAASAKGRLVPVLAVAAALAAVLLYRAPFSKSLGGEGCSLLPHDHFWIASDRVVTLGRVGPAAVEVKGGLINAIAVGDYRSFVLRRPLLDYGDAVIMPGLIDVHAHLDEPGRAEWEGFSNGTRAAAAGGITTLVDMPLNSFPSTVSEETLKLKLEAARDKLYVDVGFWGGLVPENAFNPSALEGLLKAGVLGLKSFMCPSGINDFPMTNSTHIEEGLVTLAKYKRPLLIHAERIPEAEDHDLQDDELDPRSYMTYLKSRPPSWEEAAIRDLQRAMKDTELGGRSEGAHIHIVHLSDAKTSLELMKDAKRSGASLSIETCPHYLAFSSEEVPDGDTRFKCSPPIRDDTNRENLWKALLDGHIDMLSSDHSPSTPDLKLMEEGDFLRAWGGISSLQFVLPVTWSYGRKYGITLNQLASWWSERPAKLAGQKNKGAILPGYHADIVVWKPETEFQLDNNHAIYHKHQNISAYLGKQLSGKVLSTFVRGNLVFAEDKHANAACGVPILAK

SEQ ID NO: 11774 - protein, 346 aa, Rhodopseudomonas palustris CGA009
MKAAVFEKTGERLVVRDVAAPALGDNELLLKVAFTGICGSDLHAAETPGMLQSGTVMGHEFTGEIVQSTASDWPVGARVAANPYWLCDACAAGGSCSGGGDAACANGSFMGFRPDLPGAYADYVRIRAGQAIRLPDKVSLRDGALMEPLAVARHAVDVCGPMQGADVLVIGGGPIGLGVVLMARDAGAARVVVSEPDPNRRACALEVGAVAAIDPIAEDLPTALGRLGIGAPGIVFECVGAPGFLQQTIDVMALRGRAVIVGVCMTEDRVLPRAAIRKEATLKFVLGYTMADFHHVSRYLEEHAATAAAMISRVVSLSELPEIFDRLRAEKSLIKVLVRPDQGSGT

SEQ ID NO: 11775 - protein, 1258 aa, Magnaporthe grisea 70-15
MAENENSGGIKDGSKDEGIGLEAFAAALVTGIAVFAVQITIFLLFRNKLARIYKPKTFLVPERERTDPPPASPWSLATSLLKISDRELIKKCGLDAYFFLRYLRMLLVIFIPIAFIVIPILVPINYVDGLGHEVVRDVKDNPPDVPRGLDTLAWPNLKPKNHQRRWAHLVMALAVIGWVCYIMFLELRIYIKVRQDYLTSAEHRLRASANTVLVSSIPEKWLTEDGLRGLFDVFPGGIRNIWITRDFTKLLEKVRKRDEIHDQLEAAQTELIREAKRRYLKKRIAEEKKGQGDKGRHRPTKDEIQKRQDEEDAEARLRAQQGGISAGTHEEVPHIDTAVEQDQRRNSYVPPEQDNADGSSKEAKGLGLGFIGKGIKGGVNVVGKAGHTLVGGAKTIQKGVDGQLEHTGGFGFLPGESRGPGSPVPPRPVTRGSDRRHRAAPMSSDIREETKKTSFDSDSGYQGHSPSGSKDEDLMVAGGTRPSSAQTRGNTTRKAMNLDGMIVNENNSWWKFWKAPSGGYASPVPQGREEDEFPLTGSSSSQKQKKTLWQRLLASLPLIGGEDIAPVEYPVSASEFAYSNDREDGAEWKKWLKESKRPTHRLPNFEWTPSWLPGLPLINKKVDTIYWARGELARLNMEIEIDQKHPERYPVMTSAFIQFNNQVAAHMACQSVTHHVPRQMTPRVVEVAPHDVIWENMAITWWDEWLRFAIVLALIVGMVILFIFPVVLSSGVSQIDTLVEAAPLLSFLSRNEKVYNFLKLVSGVLPAIILAIILAVVPLIFNYLAKLQGAKTGAQRSESVQVYYFAFLFFLLFLVVGLSTSAVSTLTAFFSANDAVNQVVGIPELLAKNLPKSANYFFTYMILQALSVSSGTLMQIGTLIVWYILGRLLDNTARAKWKRQTELPNVNWGSFFPVYTNFACIALIYSIVAPIIAIFAIITFSLLWLAHRYNMFYVTRFQTDTGGVLFPRAVNQLFTGLYVMELCLIGLFFLQTDERGNLVGFRQAIVMIVAMVITVGYQILLTKSFSPLFRYLPITFEDEAVLRDEAFQRAQDRRLGLVNDDPEDGDGDEAGMLRGDASGATREEIEMRRLSAKRRSVTGSAHGSKLGMLNPVAGIRHAGTWAVRAGKQIEHATLGKAEKNLKTAAQYRKERRMKDLEAQRAIGDALYGGFHDEIEDLTPDERDVLVREAFKHEALRSRRRAIWIPQDEIGVSDDEIYRTQSFSEYIWISNEGTALDSKTRVIYGRAPPDFSEMDLISL

SEQ ID NO: 11776 - protein, 449 aa, Pseudomonas putida
NMPEHAGASLASQLKLDAHWMPYTANRNFLRDPRLIVAAEGSWLVDDKGRKVYDSLSGLWTCGAGHTRKEIQEAVAKQLSTLDYSPGFQYGHPLSFQLAEKITDLTPGNLNHVFFTDSGSECALTAVKMVRAYWRLKGQATKTKMIGRARGYHGVNIAGTSLGGVNGNRKLFGQPMQDVDHLPHTLLASNAYSRGMPKEGGIALADELLKLIELHDASNIAAVFVEPLAGSAGVLVPPEGYLKRTREICNQHNILLVFDEVITGFGRTGSMFGADSFGVTPDLMCIAKQVTNGAIPMGAVIASTEIYQTFMNQPTPEYAVEFPHGYTYSAHPVACAAGLAALCLLQKENLVQSVAEVAPHFEKALHGIKGAKNVIDIRNFGLAGAIQIAPRDGDAIVRPFEAGMALWKAGFYVRFGGDTLQFGPTFNSKPQDLDRLFDAVGEVLNKLLD

SEQ ID NO: 11777 - protein, 168 aa, Triticum aestivum
MAPTVMASSVTSVDPFQGLMSTAGLPVSRRSDGASLGSVSNGGRIRCMQVWPIEGIKKFETLSYLPPFSTEALLKQVDYLIRSKWVPCLEFSKVGFIFREHNASPGYYDGRYWTMWKLAMFGCTDATQVINEVEEVKKEYPDAYVRIIGFDNMRQVQCVSFIAFKPPG

SEQ ID NO: 11778 - protein, 382 aa, Daucus carota
MRFTRVYTEVFNMTDHSLLCTETNNLCFDDLEARDDQDPRIDCENVVGNESEALICAVPLQRDEDFVFVFESKVNFCPEVIFSTDRSGELDLCVRKEALDWIYKAHAHYNFGALSVCLAVNYLDRFLSLYELPSGKKWTVQLLAVACLSLAAKMEEVNVPLTVDLQVADPKFVFEAKTIKRMELLVLSTLKWRMQACTPCSFIDYFLRKINNADALPSGSLIDRSIQFILKTMKGIDFLEFRPSEISAAVAICVTREAQTLDINKAMSNIIPVEKDRVFKCIEMIQDLTLVTETSNVASGRTRAQVPQSPVGVLDAACLSYKSDERTVGSCPNSSLHTETSPHTKRRKLIEIMKCGFYSITQFQIFSEWEFWCGCLCKRPPL

SEQ ID NO: 11779 - protein, 158 aa, uncultured bacterium pCosHE1
MKIISKDLRDGEKLPERHVFNGMGYQGDNISPHLAWDDVPAGTKSFVVTCYDPDAPTGSGWWHWVVANLPADTRVLPQGSGSDLVALPEGAIQTRTDFGKAGYGGAAPPKGETHRYIFTVHALDVEKIEVDEGASGAMVGFNVHFHSLESASITAMYS

SEQ ID NO: 11780 - protein, 483 aa, Burkholderia cepacia R1808
MSSGVRHDYAPLRLYIDGRFHDADGRRTQPVVDPGTTRVLGELPHATAHDIDAAVQAAHRAFVTWRHESPLVRSDLLRRAAALARERAETIGRHITMDQGKPLREAIAEVVSAAEQLEWHAEEGRRTYGRVVPARSPDVMQTVLREPIGVCAAFSPWNFPFSQAMHKIAAALASGCTLVLKGPEESPSAIVALAQLFHDAGLPPGCLNIVWGVPGDVSKQLIEAPQVRKISFTGSVPVGKQLAALAASLMKRMTMELGGHAPVLVCADADVERAAAMLAAYKFRNAGQVCVSPTRFFVQRAAFDRFVCAYLDAVGTIRVGYGLDAGVTMGPLAHARRVDEIDAFVADATAKGAQIATGGMRLPGPGHYFAPTVVLGPTRDTRLMNDEPFGPIVGIVPFDDLDDALAEANRLPFGLASYAFTTSARNAHRISRALEAGMVNINHFGMGPAEIPFGGVKDSGFGSEGGMEAFDGYLVTKFVTQMN

SEQ ID NO: 11781 - protein, 113 aa, Triticum aestivum
  misc_feature (37)..(37): Xaa can be any naturally occurring amino acid
  misc_feature (65)..(65): Xaa can be any naturally occurring amino acid
  misc_feature (75)..(77): Xaa can be any naturally occurring amino acid
  misc_feature (79)..(80): Xaa can be any naturally occurring amino acid
  misc_feature (83)..(83): Xaa can be any naturally occurring amino acid
  misc_feature (88)..(89): Xaa can be any naturally occurring amino acid
  misc_feature (99)..(99): Xaa can be any naturally occurring amino acid
  misc_feature (104)..(104): Xaa can be any naturally occurring amino acid
MSDSEEHHFESKADAGASKTYPQQAGTVRKNGFIVIXKNRPCKLWRFYLQRLGKHGHAKCTCRHXHIQWGKKFEXXXPXXHNXDIPQXXRTDYQLIIFXEEVWXLLLQIGTLR

SEQ ID NO: 11782 - protein, 431 aa, Ralstonia metallidurans CH34
MTSRQQQIEALQKDWDTNPRWKGVKRNFTAEDVVRLRGSVQIEHTLARRGAEKLWHLLNTEPFVNTLGALTGNQAMQQVKAGLKAIYLSGWQVAGDANLAGEMYPDQSLYPANSVPMVVKRINNTFQRADQIQWSEGKGDIDYFAPIVADAEAGFGGVLNAFELMKSMIDAGAAGVHFEDQLASVKKCGHMGGKVLVPTREAVAKLTAARLAADVSGVPTLVIARTDAEAADLVTSDVDERDQPFLTGERTVEGFFRSKPGIEQSIARALAYAEVADLVWCETGKPDLEFAKRFAQAVHAKFPGKLLAYNCSPSFNWKKNLDDATIAKFQKELGAMGYKFQFITLAGFHSLNYSMFNLAHGYARNQMSAFVELQEAEFAAAEKGFTAVKHQREVGTGYFDAVTQTIEGGQSSTTALKGSTEDEQFFEKKVA

SEQ ID NO: 11783 - protein, 513 aa, Solanum tuberosum
MALLHLPPVTQRRLQSFFLPYTDNHVSLVPDDSGDVAMNQILKIGVVLSGGQAPGGHNVISGIFDYLQTHCKGSTMYGFRGGPAGVMKGKYVVLTPEFIYPYRNQGGFDMICSGRDKIETPEQFKQAEETAKKLDLDGLVVIGGDDSNTNACLLAENFRSKNLKTRVIGCPKTIDGDLKSKEVPTSFGFDTACKIYAEMIGNVMIDARSTGKYYHFVRLMGRAASHITLECALQTHPNVTLIGEEVFAKKLTLKNVTDYIADVVCKRAESGYNYGVILIPEGLIDFIPEVQQLIAELNEILAHDVVDEAGVWKKKLTPQCLELFELLPLAIQEQLLLERDPHGNVQVAKIETEKMLIQMVETELDQRKQKGAYNAQFKGQFHFFGYEGRCGLPSNFDSTYCYALGYGAGSLLQSGKTGLISSVGNLAAPVEELTVGGTALTALMDVERRHGKFKPVIKKAMVELEGAPFKKFASKREEWALNNRYINPGPIQFVGPVANKVNHTLLLELGVDA

SEQ ID NO: 11784 - protein, 308 aa, Glycine max
  misc_feature (204)..(204): Xaa can be any naturally occurring amino acid
MASLVSSSVLLHLFLIISALHLGAAARILSEKDQQQQLQFQYHKGPLLSGKISVNLIWYGNFKPSQRAIISDFITSLSSHKSTAQPSVATWWKGTQKYYQLIKSSPKLTLTLGTQILDENYSLGKSLTNDNIVSLASKGASKDAINVVLTSSDVTVEGFCSSRCGTHGSSVGPRKFAYVWVGNSETQCPGQCAWPFQQPIYGPXNPPLVAPNNDVGLDGMVINVATLLAGTVTNPFGNGYFQGPKEAPLEAASACTGVYGKGAYPGYAGELLVDPTTGASYNANGVSDRKYLLPALFDPTTSACSTLA

SEQ ID NO: 11785 - protein, 265 aa, Zea mays
GCCSLPSLSWLSLRAPPPRIQAARQRGTVKWFNDTKGFGFISPEDGSEDLFVHQSSIKSEGFRSLAEGEEVEFSVSEGDDGRTKAVDVTGPDGSFVRGGGGGGGGGGGYGSRGGGGSGGGGRSYGGSWGGGRRSGGGGGPGACYKCGEPGHMARDCPSADGGGGYGGGGYGGGGYGGGGGGGGCFKCGEPGHMARDCSSGGGGYGGGGGGGGGGCYNCGQAGHMARDCPSGGGGGGGRFGGGGGGGDRSCYNCGEAGHIARDCPT

SEQ ID NO: 11786 - protein, 268 aa, Rhizobium etli
RVTHHTMVHEQMSRFFTGFRRDAHPMAVMCGCVGALSAFYHDSTDITDPHQRMVASLRMIAKMPTLAAMAYKYHIGQPFVYPKNDLDYASNFLRMCFAVPCEEYVVNPVLARAMDRIFILHADHEQNASTSTVRLAGSSGANPFACIAAGIACLWGPAHGGANEAALNMLNEIGTVDHIPEYIARAKDKNDPFRLMGFGHRVYKNYDPRAKIMQKTTHEVLGELGIKDDPLLEVAMELERIALTDEYFIEKKLYPNIDFYSGITLKAL

SEQ ID NO: 11787 - protein, 464 aa, Agrobacterium tumefaciens str. C58
MKELVDGKFAGLFGGVHVLPFFNPIDGADAGFDPTDHTIVDPRLGDWEDVRALSGSVEIMADLIVNHVSSQSGAFTDFIAKGSASEFADMFMTFDKVFPDGATEEDLLRIYRPRPGLPFSKVTLADGTQRMLWTTFTPEQIDIDVHSAKGTTYLETILDRFSEANVTAIRLDAAGYAIKKAGSSCFMIDDTYAFLEEVAGKARNRGMEVLVEIHSYHRDQIEIAKKVDRVYDFALPPLILHALFTGDATPLAKWLAISPRNAITVLDTHDGIGVIDVGAHSDGRAGLLEPQAIDNLVGEIHRRSDGQSRQATGAAASNLDLYQVNCTYYDALGRNDNDYLIARAIQFFAPGIPQVYYVGLLGGVNDMDLLAKTGVGRDINRHYYGNDEIGTALETPLFHRLSNLIRFRNTHPAFGGALKATIADAGALVLSWQHGDAFAELKISFADRKASIAASGQSEMQIVE

SEQ ID NO: 11788 - protein, 507 aa, Streptomyces avermitilis MA-4680
MTRFAAPGTDGAIVSYQARYDHFIGGEYVPPARGQYFENPSPVNGQPFTEIARGTAEDVERALDAAHAVAPAWGRTSVAERSDILRRIADRMEANLEKLAVAESWENGKPVRETLAADIPLAIDHFRYFAGAIRAQEGSLGEVDDDTVAYHFHEPLGVVAQIIPWNFPILMATWKLAPALAAGNAVVLKPAEQTPASIHYWLSLVADLLPPGVLNIVNGFGVEAGKPLASSPRVAKVAFTGETTTGRLIMQYASENITPVTLELGGKSPNIFFDDVWSANDDFRDKALEGFTMFALNQGEVCTCPSRALVQRGQYAEFMEAAVARTELIKTGHPLDTDTMIGAQASNDQLEKILSYLDIGRQEGAKILTGGERIEHDGELKGGYYVQPTIFEGDNRMRIFQEEIFGPVVSVTSFNDFDDAIKIANDTLYGLGAGVWTRDINTAYRAGRAIQAGRVWTNCYHAYPAHAAFGGYKGSGIGRETHKMMLDHYQQTKNLLVSYSPKKLGFF

SEQ ID NO: 11789 - protein, 176 aa, Gossypium hirsutum
LFSFILILTHFLLKSSIRIQVLGWICVAISVSVFAAPLNIMARVVRTKSVEFMPFTLSFFLTLSAVMWFAYGLFIKDLCVALPNVLGFILGMLQMLLYAIHRHSEKVNIEEKKLPAEQMKSINVVLTTLGASEVHPVVLDIHTDDTKEEDNKNNEPTGEPDKQTDVKMEDANESPV

SEQ ID NO: 11790 - protein, 434 aa, Bradyrhizobium japonicum USDA 110
MDAKASNKTATLTVGNKNYDLPIHSGSVGPDVIDIGKLYGQSGLFTYDPGFTSTASCQSKITYIDGDAGVLEYRGYPIEQLAENGDFLETCYLLLYGNLPTAAQKKDFDDRVIHHTMVHEQMARFFQGFRRDAHPMAVMVASVGALAAFYHDSTDINDPKQRMIASMRMIAKIPTLAAMAYKYTIGQPFVYPKNSLKFAENFLHMCFAVPCEEYKINPVLADALDKIFILHADHEQNASTSTVRIAGSSGANPFACIAAGIACLWGPAHGGANEAALAMLAEIGSVDKIPEFIAKVKDKNSEVRLMGFGHRVYKNYDPRAKIMQKMCHAVLKETGHGDDPMLKVAMELEKIALSDQYFIDRKLYPNVDFYSGITLKAMGFPVSMFTVLFAVARTVGWISQWSEMIEDPQQKIGRPRQLYTGVTRRDYVAIKDRK

SEQ ID NO: 11791 - protein, 475 aa, Wigglesworthia glossinidia endosymbiont of Glossina brevipalpis
MIDNLIWFRKDLRLNDNPALYYACVDEYKSASGILILNKKKWNEKIVSKNRIRFMYKNIFSLKRNLKKIGIELIFYTCRDFFEYTCLLYNFCYTNKVKELYFNKGIEKEDLEEDKIIIKKLKKITKCICFNGNLLIDPEKIKNKNKKTYKVYSYFLKSCISFISNNNINIIPFPKIRKNKLNLIKSYNDSIKIKKKLSPCYEEHALNKLNNFIKLKINKYHITRDFCINSTSFLSPYINIGVLSLRECINNIKNNNFDFIEKKNSGHFKWFSEIIWREFCHHLIIEYSDFFDSKKLIKWTKYIKWENKIKKIQAWKNGTTGFPIIDAAMRQLKKTGWMHNRLRMITSSFLVKDLLVDWKIGEKYFYYHLIDGNSAINNFNWQWISSSGICSSPYFRMINPITQSKKFKSIYKYIKFWIPELKNIPFNEIHEPYNWIIKNKINYPNQIIEHKTAKINFFKACKKAIYIFKSKNINK

SEQ ID NO: 11792 - protein, 331 aa, Ustilago maydis 521
MADNTTLEVDLDNVIDRLLEVRGSRPGKPVHLEEYEIKYLCLKARDIFINQPILLELEAPIKICGDIHGQYYDLLRLFEYGGFPPEANYLFLGDYVDRGKQSLETICLLLAYKIKYPENFFILRGNHECASINRIYGFYDECKRRFNIKLWKTFTDCFNCLPIAAIIDEKIFTMHGGLSPDLQSMEQIRRVMRPTDVPDTGLLCDLLWSDPDKDISGWSENDRGVSFTFGPDVVSRFLQKHDMDLICRAHQVVEDGYEFFAKRQLVTLFSAPNYCGEFDNAGAMMSVDETLLCSFQILKPAEKKQKYAYGGINMGRPVTPPRKQKKKSDGK

SEQ ID NO: 11793 - protein, 503 aa, Rhodopseudomonas palustris CGA009
MINIATRINPAIAPAVSEVISQLQARHLIGNTLVPSVGGATLDVIDPATGQVIGKAPAASGDDVARAVEAASAAFPGWAATPARQRGKLIAAAASAIAERSDVIATVLALETGKAIRTECRGEVATAIDITTMYAGLASELKGETLPFDPQILTYTSREPLGVVAAILPWNVPLVLMMLKIAPALVAGNTVVVKASEEAPYATIEMARLMARLLPDGVLNVICGTGRDCGAALVEHPAVAKVTFTGSQAVGELIYQMAAKKIIPVSLELGGKSPMIVYPDADMARVVAGAIAGMRFTRQGQSCTAASRIYVHTTLIDAFVAALREAVSKLKIGDPLDEATDIGTVISPRQKAKVESYIDLGARTAGAKVDRCGELPGAAHLKDGLFLQPTIITGVPEDSPLMREEIFGPVVCVQPWDDEDDVIARANDSDFGLAATVWTNDLRSALRTVQRLDAGYVQVNQNLTIQPNLSYGGFRKSGLGKEASLEAMLEHFTKKKTVVIDMR

SEQ ID NO: 11794 - protein, 353 aa, Apium graveolens
MMQNGIGMNQNMISGVGQSGISSANSTMMPTPGMGQQGQPGPQSLGMANNAAANMPLPSQTSNAMQSAQSKYVRVWEGNLSGQRQGQPVFITRLEGYRSASASETLAANWPSTMQIVRLISQDHMNNKQYVGKADFLVFRAMNQHGFLGQLQEKKLCAVIQLPSQTLLLSVSDKACRLIGMLFPGDMVVFKPQISNQQQHQQLQPQQHHPQLQHQQQLQQLQQQPLPQLQQQQQIPQLQQQQQIPQLQQQQQIPQLQQQIPQLQQQQQQQQQQISQIQQQQQIPQMQPQQQQQAPQMQQHIPQMQQQPSQQQQMVGTGMGQAYVQGQGRSQMVSQGQVTSQGPTMSGGGGYLS

SEQ ID NO: 11795 - protein, 300 aa, Triticum aestivum
MIEQVCTKKQAGTGPEFPGYRRPTRPTSLSSSSSVPPSHPRLIGVSAAAAMAKTYPVVSAEYQEAVEKARQKLRALIAEKNCSPLMLRLAWHSAGTFDVSSKTGGPFGTMKKPAEQAHAANAGLDIAVRMLEPMKEEIPTISYADLYQLAGVVAVEVSGGPVIPFHPGREDKPQPPPEGRLPDATKGSDHLRQVFGKQMGLSDQDIVALSGGHTLGRCHKERSGFEGPWDRNPLKFDNSYFTELLSGDKEGLLQLPSDKTLLTDPVFRPLVEKYAADEKAFFEDYKEAHLRLSELGYAEA

SEQ ID NO: 11796 - protein, 366 aa, Candida albicans SC5314
MATFAPHISKITKSSTKFNYGRIAKTFLGVAGSAAIATYFYNNGNPFNNNNNNNNNNEGSKNAAKALFGASAGANVKIAKVPEGKSASDYQKVYNDIATKISENLEFDENAGYYGQLLRLAWHTSGTYDKSDNSGGSYGGTMIFAPEEFDPENAGLQVGREFLMEFLVKYPWISRGDLWTLGGVAAVQESGGPKIEWRPGRVDDNTASKVPPNGRLPDASKDGKYVKDLFARMGFNERETVALLGAHVLGRCHKHNSGYDGPWGPSFNQFTNVFYTTLLGDWHVKKWDGKKQYEDDETGEFMMLPTDMALKEESYFLKYVKMYADDQDLFFKDFAKAFSKLISNGIKYPADSKPILFKTLDEQDEE

SEQ ID NO: 11797 - protein, 213 aa, Triticum aestivum
QRPVIVNIRATGICGSDVHYWTHGRIGHFVCEKPMVLGHESSGVVVSVADDVTSLKVGDRVALEPGVPCRVCEMCKLGMYNLCPDMAFAATPPYDGTLCNYYKHAADFCYKLPDHISLEEGALIEPLSVGIHASRRGGVKLSDRVFVFGAGPVGLLTAAAAKAAGASHVTIADRDPARLAFAKEYCADETIHLTGARRLDQDSNDFAKEEAEK

SEQ ID NO: 11798 - protein, 457 aa, Gibberella zeae PH-1
MALSYQQTKLIRGTIPALTDHGERITTIFYRNMLRDHPELNDYFNTVNQANGRQPRALTAVILSYANNINHITELIPKMERMCHKHCSLGIKPEHYAIVEKYLIAAFAEVLGPTMTTQIREAWTKAYWMLAKMLIGREAQLYRDFGKWQGYRKFRIEKKVEESDDIYSFYLVPVDGKRLPSFQPGQYVSVQIPIVDKGYVQSRQYSLSDAPRPDYYRVTVKRDEGIHMTRSGRYLGGDALNPGVVSNLLIDMKDEGDVVELAHPAGEFYLDMSNTSNVPIVLISAGVGVTPMMSILNTVSERQPHRPVSWIHGSRRSVPFYDQVRRIARNRSNFRTNIFKTHLAESDIFGVTYDHDFRMDLAKVSKDDLYLCHSSTEYYICGPEQFMLEMAEYLKAQKVDASRMHFELFSTGDMEFKVDNLSISSASKSPSIASAEQRCPSTGAVSADGATCPFSAV

SEQ ID NO: 11799 - protein, 380 aa, Gibberella zeae PH-1
MDSAARQQPQVQPCRYKVGKTLGAGSYSVVKECVHIDTGRYYAAKVINKRLMAGREHMVRNEIAVLKKVSMGHQNILTLVDYFETMNNLYLVTDLALGGELFDRICRKGSYFESDAADLVRATLSAVAYLHDHGIVHRDLKPENLLFRTPEDNADLLIADFGLSRIMDEEQFHVLTTTCGTPGYMAPEIFKKTGHGKPVDLWALGVITYFLLCGYTPFDRDSDFEEMQAILNADYSFTPIEYWRGVSAHAKDFIQRCLTIDSTKRITAHEALQHPFVAGFINAEGESQNLLPNIKKNFNARRTLHAAIDTVRAINKLREAQSGLMDGARSKEPSRGAAQQTPTNRKHPTSHPRCNPATTEIELSKLPKVSGAQRRAVRIR

SEQ ID NO: 11800 - protein, 167 aa, Ostreococcus tauri
MTVTLRSSDDETFVVDDDVALSETIKSIIEGARDGRDGVNGAKDGVRDADTEDESMVPLPNVSSKILAKVIEYAKFHVDAKKANEAEAKIKEFNTEFVKVDQATLFEIILAANYLNMKGLLDLTCMTVANMMKGKTPEEIRKTFNIKNDFTPEEEEEVRKENQWAFD

SEQ ID NO: 11801 - protein, 456 aa, Arabidopsis thaliana
MDQEEEEIEIPNYFICPISLEIMKDPVTTVSGITYDRQNIVKWLEKVPSCPVTKQPLPLDSDLTPNHMLRRLIQHWCVENETRGVVRISTPRVPPGKLNVVEEIKNLKKFGQEALGREETLQKLEVLAMDGNNRRLMCECGVHKSLILFVVKCTSEDEDGRRRIKGLDESLRLLHLIGIPSNDAKTILMENDRVMESLTWVLHQEDFLSKAYTIVLLRNLTEYTSSHIVERLNPEIFKGIIGFLKDVVNSVNRTSPTVRETVQSSSRPSLGKTEPSKLDHSLVIKQAVTAALMILLETSSWSRNRSLLVDLGAVSELIELEISYTGEKRITELMLGVLSRLCCCANGRAEILAHRGGIAVVTKRLLRVSPAADDRAISILTTVSKFSPENMVVEEMVNVGTVEKLCSVLGMDCGLNLKEKAKEILKDHFDEWKKFPCIDITLLTKLLSISPKGPKI

SEQ ID NO: 11802 - protein, 203 aa, Glycine max
  misc_feature (98)..(98): Xaa can be any naturally occurring amino acid
MADGPASPGGGSHESGDHSPRSNVREQDRYLPIANISRIMKKALPANGKIAKDAKETVQECVSEFISFITSELVCFFFSSDSFLLRFSYLSSPAFNLXFLEFCRASDKCQREKRKTINGDDLLWAMATLGFEDYMDPLKIYLTRYREMEGDTKGSAKGGDSSAKRDVQPSPNAQLAHQGSFSQNVTYPNSQGRHMMVPMQGPE

SEQ ID NO: 11803 - protein, 321 aa, Pseudomonas aeruginosa
MALNPDIAAYLELVGNGRSSGKSLPMHQLTVQQAREQFDQSSALMDPGLDEPLARVETLFVPARDGTPLPARLYSPQGLSASPPLPGVLYLHGGGYVVGSLDSHDALCASLAERAGCVVLSLAYRLAPEWRFPTAAEDAEDAWCWLAAEAARLGIDPQRLAVAGDSVGGSLCAVLSHRLALRGEASQPRLQVLIYPVTDASRTHQSIERYAVGHLLEKDSLEWFYQHYQRSPEDRQDPRFSPLLGVVPADLAPTLLLVAECDPLHDEGIAYAEHLRQGGARVELCVYPGMTHDFLRMGAIVDEADDAKDMIADALVAALAT

SEQ ID NO: 11804 - protein, 498 aa, Leptospira interrogans serovar Copenhageni str. Fiocruz L1-130
MQTALYISVLIISSCGLVYELLAGTIASYLLGETVTQFSLIIGTYLFSMGVGSWLSKYLEKDLIPKFLEIELAIGLVGGFSSAILYLSFGQIRYFQIPLFLLVILIGILVGLEIPVLLRILKKELQFKELVSRVLSLDYVGALLASILFPIFFAPKLGLMRTGFIFGILNVGVALWGTWVLPLRQSKIIILRAQSVVVLTLLILGFSYSDLITYYSEESLYTDEIILSKQTQYQRIIVTRWKNEIRLFLNGHLQFSSRDEYRYHETLVHPALLAHPTPKKVLVLGGGDGLAVREILKHKNVESVTLVDLDSAITNLFSEHGILKKLNEESLKNSKVTVINTDAFLWLEESDQIFDVVLIDFPDPSNFSLGKLYTTAFFHTLKRRMNETSVLEIQSTSPLFARSSYWCIERTIASLGFYTLPLHVYVPSFGEWGFVLAGQRPIQFKKDFPKDLKFLNIQELESIQTFPQDMSRVPVEINRLDNQALVRYYDREWNRILD

SEQ ID NO: 11805 - protein, 176 aa, Zea mays
VSTIARYGPATTFTEPVRKWYKEWVPVVAADVNTNASANGGAAPSTGTGSGGGSRGSDLLLFKWTPVNGANGGGGEGEQHQAAETATRRRRYVPVSLMEEQRQESTKSDDENKANDGDPSSNETEPSNEFSDINGTPMDESQASDEDGRNSGKNGGETDLNLNLGFERPGPVIIEI

SEQ ID NO: 11806 - protein, 222 aa, Bacillus cereus ATCC 14579
MRFFIDTANLEDIKKAYKLGVLAGVTTNPSLVAKEGVKFEDRIAEICQAVPKVESVSAEVTPDAVTAEEMIAQAEELIKINGGDKNVTIKLPMTLAGLEACRYLTEKGVKTNVTLIFTVNQALLAARAGATYVSPFLGRLDDISEDGVLLVAKIAELFDVHQLDTQIIAASVRHPDHVTRVAMAGAHIATIPYKVIEQLAMHPLTDQGIEKFAADWAKAPKL

SEQ ID NO: 11807 - protein, 501 aa, Arabidopsis thaliana
MANLRLMITLITVLMITKSSNGIKIDLPKSLNLTLSTDPSIISAASHDFGNITTVTPGGVICPSSTADISRLLQYAANGKSTFQVAARGQGHSLNGQASVSGGVIVNMTCITDVVVSKDKKYADVAAGTLWVDVLKKTAEKGVSPVSWTDYLHITVGGTLSNGGIGGQVFRNGPLVSNVLELDVITGKGEMLTCSRQLNPELFYGVLGGLGQFGIITRARIVLDHAPKRAKWFRMLYSDFTTFTKDQERLISMANDIGVDYLEGQIFLSNGVVDTSFFPPSDQSKVADLVKQHGIIYVLEVAKYYDDPNLPIISKVIDTLTKTLSYLPGFISMHDVAYFDFLNRVHVEENKLRSLGLWELPHPWLNLYVPKSRILDFHNGVVKDILLKQKSASGLALLYPTNRNKWDNRMSAMIPEIDEDVIYIIGLLQSATPKDLPEVESVNEKIIRFCKDSGIKIKQYLMHYTSKEDWIEHFGSKWDDFSKRKDLFDPKKLLSPGQDIF

SEQ ID NO: 11808 - protein, 395 aa, Methanosarcina acetivorans C2A
MNEQGLSEKEIFSYLENAKSEDTDYYRVLSSMCTHPHKIAVEANRLFIEANLGDLGLFAGASRLEQEVVGMLGELLHAPSIDVPFGGSCESSACGYLTTGGTESNIQAVRGMKNLVTTGKKELKGAPNIVIPESAHFSFDKVADMMGIEVRRASLDSEFRVDMASIESLIDANTIGLIGIAGNTEFGQIDPIDKLSEIALENELFLHIDAAFGGFVIPFLEKPQPFDFKLPGVTSIAVDPHKMGLSTIPSGALLFRSASFLDSLKVNTPYLTTKAQFTLTGTRSGASAAATCAVMKYLGNEGYRKNVQYCMQLTEKLVIEARKIGFEPLLEPVMNVVALKVPNPDFVREQMLERFGWNVSITRTPRALRLVLMPHNTLEDIEIFVQDLKEVTVEI

SEQ ID NO: 11809 - protein, 389 aa, Brassica napus
MNRGALESSPVQQLMVAGNPNWWNVSGSTRPPPPLMGHQQGPLPPQMTPNNNYLRPRMMMTSSSPSLLDNPSLSSWLESNDLPPESWSLSQLLLGGLMMGEEERLEIMNHHSHHDEQHHHSFQGKMRLENWEEQVLRHQQASMGVVDIKQESNINNNNGYLISSPNSPPNKSCVTTTTTTSLNSNDNTNNNNNMLGFSSNHNGLNLSEIRHTPPDRSSECNSLDIGGSTNKKPRLQPSPSSQSTLKVRKEKLGGRIAVLHQLVSPFGKTDTASVLSEAIGYIRFLQNQIEALSHPYFGTTASGNMRNQHLQGDRSCLFPEDPGQLVTDQCVKRRGVSSSSSENQNAKEEPKKDLRSRGLCLVPISYTLQVGSDNGADYWAPTLGSASFH

SEQ ID NO: 11810 - protein, 161 aa, Zea mays
SAISSFNERPIILALSNPTSQSECTAEQAYTWSKGQAVFATGSPFDPVEYNGKIHVPGQANNAYIFPGFGLGVVMSGAIRVHDDMLLAASEALAQQVTEENFEKGLIYPPFSNIRKISAHIAASVAAKAYELGLASRRPRPKDLVKYAESCMYSPIYRNYR

SEQ ID NO: 11811 - protein, 217 aa, Glycine max
MASLALETEDVISDIYLSLGLKESDKGVGVPRVLSLLSSLLERSVQRNETALEAKHVKDVVTVFHGLRAPTLSVRKYIDRIFKYSGCSPSCFVVAHIYVDRFIQHTEIKLTSLNVHRLLITSIMLAAKFIDDAFYNNAYYAKVGGVSTSELNRLEMSFLFGIDFRLQFSVDTFGRYCRQLEKEAAEVVQIERPMQACRIKESWSNKDDPTCASTIAR

SEQ ID NO: 11812 - protein, 231 aa, Lycopodium annotinum
MGRGKIEIKRIENATSRQVTFSKRRGGLLKKAHELSVLCDAQVALIIFSSTGKLFEYASPSMKEILDRYGKYPEGVQTGTVTDPNNDVMLQYLNREVIRMKQQIERTHQTQRHMMGEDLAILPLKDLQQLEEQLDIGLRRIRARKDQLLVEQLEELHRKERHWLEENEALRRKLAGGQALSGPVPSPLSIVNPLETREPPSLGTVSLPFSVQFNQQNMQDTPNLQTSLQLG

SEQ ID NO: 11813 - protein, 479 aa, Pseudomonas putida
MSLLIRGATVVTHEESYPADVLCADGLIRAIGQNLEPPTDCEILDGSGQYLMPGGIDPHTHMQLPFMGTVASEDFFSGTAAGLAGGTTSIIDFVIPNPQQSLLEAFHTWRGWAQKSASDYGFHVAITWWSEQVAEEMGELVAKHGVNSFKHFMAYKNAIMAADNTLVASFERCLQLGAVPTVHAENGELVYHLQKKLLAQGITGPEAHPLSRPSQVEGEAASRAIRIAETLGTPLYLVHISSREALDEIAYARGKGQPVYGEVLPGHLLLDDSVYRDPDWATAAGYVMSPPFRPREHQEALWRGLQSGNLHTTATDHCCFCAEQKAMGRDDFSRIPNGTAGIEDRMAVLWDAGVNSGRLSMHEFVALTSTNTAKIFNLFPRKGAIRVGADADLVLWDPQGTRTISAQTHHQQVDFNIFEGRTVRGIPSHTISQGKVLWADGDLRAEPGAGRYVERPAYPSVYEVLGRRAEHQRPMPVQR

SEQ ID NO: 11814 - protein, 237 aa, Lycopodium annotinum
MGRGKIEIKRIENATCRQVTFSKRRSGLLKKAHELSVLCDAQVAVIIFSSTGKLFQFASTRMKEILERYERNSDPLQIDAVIPRDLEYWSREAAKAKDELDRCHQKNRHMLGEDLSALNLNELEELEQQLDSGLRRVRCRKDQVLRDRIEELTKQESFLREENRMLRSKIAVPKESTEPILDEMNMETREPPSMAIVEEELSLKLNSKTWPDIHFSLQLGQYQPPRTETPTANHRPN

SEQ ID NO: 11815 - protein, 240 aa, Triticum aestivum
MGDRPKLPARYEQVKLLGEGNFAKVYLARHMDTKEEVAIKVMDKEKLIKLGAVQQIKREIAVMRRLRHPNIVQLHKVMACKSRIFVVMEYVRGGPLYRHIPANGGLKEDETRRIFQQLVSALTFCHAQGVYHRDIKPDNLLVDEHGNLKVADFGLSAHADTARREALLHTVCGTPLYVPPEVFARRGYDGAKADAWSCGIVLFVLAAGRKPFRDDDFITLYRTICRGDYRCPRTFSPELV

SEQ ID NO: 11816 - protein, 117 aa, Triticum aestivum
  misc_feature (60)..(60): Xaa can be any naturally occurring amino acid
  misc_feature (72)..(72): Xaa can be any naturally occurring amino acid
MAPAVMASSATTVAPFQGLKSTAGLPVSRRSSGSLGSVSNGGRIRCMQVWPIEGIKKFEXTLSYLPPLSTEXLLKQVDYLIRSKVGACLQFSKGLLRPLSKKPPGLLVEYWDKCWLP

SEQ ID NO: 11817 - protein, 324 aa, Triticum aestivum
MEAETAAKRARENEGAAAADGAGEQAGISAVIPGWFSEISPMWPGEAHSLKVEKVLFQGKSDYQDVLVFQSSTYGKVLVLDGVIQVTERDECAYQEMITHLPLCSIKDPKKVLVIGGGDGGVLREVSRHSSVEQIDICEIDKMVVDVSKQFFPHLALGFEDPRVSLHIGDGVAFLKNAPEGTYDAVIVDSSDPVGPAQELFEKPFFQSVSRALRPGGVVCTQAESIWLHMHIIEDIVTNCRQVFKGSVNYAWTTVPTYPSGVIGFMLCSTEGPSVDFQHPVFSIEEDEYSTKSKGPLKFYNSEFHTASFCLPSFARRVIEAKAN

SEQ ID NO: 11818 - protein, 127 aa, Brassica napus
  misc_feature (125)..(125): Xaa can be any naturally occurring amino acid
MTRVTRDFRDSLHKEVVPAAAVSADVRFASSRFPNYRIGANDQIFDVKDDPKVLSMKEVVARETAQLMDQQKRMSVRDLANKFEKGLAAAAKLSEEAKLKEATSLEKHVLLKKLRDALESLRGRXAG

SEQ ID NO: 11819 - protein, 224 aa, Candida albicans SC5314
MSSDKSNLLKKYKIVFLGDQSVGKTSLITRFMYDTFDETYAATIGIDFLSKTMYLEEGKTIRLQLWDTAGQERFRSLIPSYIRDSHVAVICYDITNKKSFDNLDKWIKDVKLERGDDVIIVLVGNKSDLASDKRQVSLDDVENLQIKIGAKFFIETSTKANHNVKLLFKKIAQSLPDFNQDSNDKSNDNNNNNNNNNNNNNQSETIDITIDNTAPNPQGTSTCC

SEQ ID NO: 11820 - protein, 375 aa, Pseudomonas putida KT2440
MAEAKVLSGAGLRGQVAGQTALSTVGQAGAGLTYRGYDVRDLAAGAEFEEVAYLLLYGELPTQAELADYKRKLKGLRDLPQALKEVLERIPRDAHPMDVMRTGCSVLGTLEPELTFEAQRDKTDRLLALFPAVMCYWYRFTHHGVRIDCTTDEDTLGGHFLHLLHGKKPSELHVKVMNVSLILYAEHEFNASTFTARVCASTLSDLYSCVTAAIGSLRGPLHGGANEAAMELIERFQSPQEATAELLRMLERKDKIMGFGHAIYKESDPRNEVIKGWSKQLADEVGDKVLYPVSEAIDKTMWEQKRLFPNADFYHASAYHFMGIPTKLFTPIFVCSRLTGWAAHVFEQRANNRIIRPSAEYVGVEQRQFVPIEQR

SEQ ID NO: 11821 - protein, 199 aa, Triticum aestivum
MAMEKNQDSKVIMGRYKLGRLLGRGSFAKVYKAHNISTGEFVAIKVFDKEAVHRSGTVEQVKREVDVMRRVHHPNVVRLHEVMATRSRIYFVMEYASGGELFDRLAKSTRFPEPVARRYFQQLVTAVEFCHSRGVYHRDLKPENLLLDAHGNLKVSDFGLSALADGASRHRGDALLHTTCGTPAYVAPEVILKRGYDGA

SEQ ID NO: 11822 - protein, 66 aa, Zea mays
MQNPNAATCEHKEEMDSRLVFGGNVYYTCTPDEVQQYFNFFGTVNKLTILTDNFGQPKVAAYAEFA

SEQ ID NO: 11823 - protein, 279 aa, Synechocystis sp. PCC 6803
MALIQWYPGHIAKAERQLREQLNKVDVVLEVIDARIPLASQHPDVPLWVGEKPKLIILNRVDMITPELQEQWLTWFRQQNQTVYYANAKQGTGVKAISKAAQQAGKAVNERRQRRGMQPRPVRAVVMGFPNVGKSALINRLLGRKVVESARRAGVTRQLRWIRISDSLELLDSPGVIPLKLENQANALKLAICEDIGEAAYENQAVAIAMVDLLLDLSLGEALTQRYQVPPEAMNGDLYLIALADARHNGDRERAAVQLLNDFRKGLLGPLPLELPPEV

SEQ ID NO: 11824 - protein, 480 aa, Neisseria meningitidis Z2491
MKQLAMYINGRFENDFNGEWRNVLNPSTEEAIAREPKGGKADVDRAVAAARAAQPAWERLPAVERGAYLRKIAQGIRERADELTDTIVAEGGKTKDLARVEVMFTADYLDYQAEWARRYEGEIIQSDRPRENILLFKRPLGVIAGILPWNFPFFLIARKMGPALVTGNTIVVKPSSVTPINCHIFAEIVDAVGLPAGVFNVVNGPGAEIGNALSAHPQVDMVSLTGSVEAGRQVMEAASANITKVSLELGGKAPAIVLKDADLDLAVKSILASRVGNTGQICNCAERVYVHSSLKDAFIEKMTAAMKGVRYGNPAEAEAGALEMGPLIEERAVKAVAEKVERAVKQGAKLVCGGKRAEGRGYFFEPTLLTDTDNSMDIMKEETFGPVLPVSAFDTLDQVIALANDCEFGLTSSVYTTNLNEAFYVTRRLQFGETYINRENFEAMQGFHAGWKKSGIGGADGKHGLEEYLQTQVVYLETDI

SEQ ID NO: 11825 - protein, 238 aa, Oryza sativa (japonica cultivar-group)
MFIRMRAASTTSSSEPCRRLSPPSSKRPAGRTKFHETRHPVFRGVRRRGRAGRWVCEVRVPGRRGCRLWLGTFDAADAAARAHDAAMLALRGRAAACLNFADSAWLLAVPPPATLRCAADVQRAVARALEDFEQRESSSSVFPLAIDVVAEDAMSATSEPSAASDDDAVTSSSSTTDADEEASPFELDVVSDMGWSLYYASLAEGLLMEPPASGASSDDDDDAIVDSSDIADVSLWSY

SEQ ID NO: 11826 - protein, 214 aa, Listeria innocua Clip11262
MRFFIDTANVEEIKKANRMGFIAGVTTNPSLVAKEGRDFNEVIQEITSIVDGPISGEVVSLNAEEMIEEGRVIAKIHPNMVVKIPMTGEGLAAVKVLTEEGIKTNVTLVFSATQALLAARAGATYVSPFLGRLDDIGDDGLVLIRDIAEIFETHGIPTEIISASVRHPIHVIECAKAGADIATVPYKVFEQMLKHPLTDSGIDKFLADWEAAKK

SEQ ID NO: 11827 - protein, 158 aa, uncultured bacterium pCosHE2
MKLISNDLRDGDKLPHRHVFNGMGYDGDNISPHLAWDDVPAGTKSFVVTCYDPDAPTGSGWWHWVVVNLPADTRVLPQGFGSGLVAMPDGVLQTRTDFGKAGYDGAAPPKGETHRYIFTVHALDIERIDVDEGASGAMVGFNVHFHSLASASITAMFS

SEQ ID NO: 11828 - protein, 92 aa, Triticum aestivum
MVLPSEQKARYSTEEDPSRCSCSDSFFGKYFSFLLLMFVTASLVILPLVLPPLPPPPSMLMLVPVAMLVMLLVLAFMPTSGGRGATGPTAYL

SEQ ID NO: 11829 - protein, 96 aa, Zea mays
MNSFSAQVQKPTPTTTGPQLVTVASVDASSSIEQRGGREMKEGTANCIDILIAIILPPLGVFLKFGCKVEFWLCLLLTFLAYLPGIIYAIYVITKD

SEQ ID NO: 11830 - protein, 75 aa, Glycine max
MPTRCEICCEIMIAILIPPLGVCFRHGCCSVEFIICLLLTILGYIPGIIYALYAIIFVDRDQYFDEYRRPLYAQY

SEQ ID NO: 11831 - protein, 164 aa, Cicer arietinum
LVAGEAGTGIAELIALEMSKQTKTPIEETRKKIWLVDSKGLIVSSRANSLQHFKKPWAHEHEPVGTLIDAVKVIKPTVLIGSSGVGKTFTKEVIEAMTSNNEKPLILALSNPTSQSECTAEEAYTWSEGRAIFASGSPFDPVEYNGKVYYSGQSNNAYIFPGFG

SEQ ID NO: 11832 - protein, 427 aa, Escherichia coli
MADTKAKLTLNGDTAVELDVLKGTLGQDVIDIRTLGSKGVFTFDPGFTSTASCESKITFIDGDEGILLHRGFPIDQLATDSNYLEVCYILLNGEKPTQEQYDEFKTTVTRHTMIHEQITRLFHAFRRDSHPMAVMCGITGALAAFYHDSLDVNNPRHREIAAFRLLSKMPTMAAMCYKYSIGQPFVYPRNDLSYAGNFLNMMFSTPCEPYEVNPILERAMDRILILHADHEQNASTSTVRTAGSSGANPFACIAAGIASLWGPAHGGANEAALKMLEEISSVKHIPEFFRRAKDKNDSFRLMGFGHRVYKNYDPRATVMRETCHEVLKELGTKDDLLEVAMELENIALNDPYFIEKKLYPNVDFYSGIILKAMGIPSSMFTVIAAMARTVGWIAHWSEMHSDGMKIARPRQLYTGYEKRDFKSDIKR

SEQ ID NO: 11833 - protein, 482 aa, Candida albicans SC5314
MGSNSSKSAPTLQRSDTNNSTRSTRSNRSIRSRRSISSIKDSQQQQSDSQQQQEEEEEQSQSQQRPQPILSRNNSATSENPILIRRNTNETLQTPNFSDTLSPHSHSQQQQQQPGSPLSTSMNGNTISRTSTNHSIISTTSHKSSSQQSNLPLKKETTTSSLSTNSNTIDIDSLIDKLLNAGFSGKRTKNVCLKNTEIELICASAREIFLSQPSLLELAPPVKVVGDVHGQYHDLIRIFSKCGFPPKTNYLFLGDYVDRGKQSLETILLLLCYKIKYPENFFLLRGNHECANVTRVYGFYDECKRRCNIKTWKLFIDTFNTLPIAAIVAGKIFCVHGGLSPVLNSMDEIRNIARPTDVPDFGLLNDLLWSDPADTINEWEDNERGVSYVFSKVAINKFLSKFNFDLVCRAHMVVEDGYEFFNDRTLVTVFSAPNYCGEFDNWGAVMGVSEDLLCSFELLDPLDSAALKQVMKKEKQERKKST

SEQ ID NO: 11834 - protein, 126 aa, Zea mays
MPVAASLMAIELEKDQLAWAEQQRQQNRRQTMVVCRKSAAAVAKGQQRQNASPPSPKPPPAGGLSAEAFLVLACVAVSLIVLPLVLPPLPPPPPLLLLVPVCLLLLLAALATFVPSDVRSMPSSNL

SEQ ID NO: 11835 - protein, 279 aa, Bacillus cereus ATCC 14579
MKNLQSKTVLSNGVEMPWFGLGVFKVEEGPELVEAIKSAIKAGYRSIDTAAIYGNEAAVGEGIRAGIETTGISREELFITSKVWNADQGYEETIAAYEESLKKLKLDYLDLYLVHWPVEGKYKDTWRALETLYKEKRVRAIGVSNFQIHHLQDVIKDAEIKPMINQVEYHPRLTQKELQAFCKEQGIQMEAWSPLMQGQLLDNETLQEIAEKHGKTTAQVILRWDLQNGVITIPKSTKEHRIIANADVFNFELTKEDMEKIDALNQNHRVGPDPDNFDF

SEQ ID NO: 11836 - protein, 170 aa, Triticum aestivum
  misc_feature (139)..(139): Xaa can be any naturally occurring amino acid
  misc_feature (144)..(144): Xaa can be any naturally occurring amino acid
  misc_feature (155)..(155): Xaa can be any naturally occurring amino acid
  misc_feature (161)..(161): Xaa can be any naturally occurring amino acid
  misc_feature (164)..(165): Xaa can be any naturally occurring amino acid
  misc_feature (167)..(167): Xaa can be any naturally occurring amino acid
MSHRMMMNPVKVEGDGRAGGGGAPRPMDGLGDAGPTPFLAKTYDMVDDPATDAVVSWSATNNSFVVWDPHLFATVLLPRYFKHGNFSSFVRQLNTYGFRKVDPDRWEFANEGFLRGQRHLLRNIKRRKPNMGSKNNNLXVLLEXGNFGHDVEIDXLKRDRXLLXXEXVKL

SEQ ID NO: 11837 - protein, 157 aa, Carica papaya
MDVRMFVLESPILSSLRQLMELQDTETEKSFNAPTRTYVRDAKAMAATPADAKEYPNSYVFVIDMPGLKSGDIKVQVEDDNVLQISGERKREEEKDGVKYLRMERRIGKFMRKFSLPDNANTDAISAVCQDGVLTVTVQKLPPPEPKKPKTIEVKIA

SEQ ID NO: 11838 - protein, 386 aa, Aspergillus parasiticus
MTGLDMETIFAKIKEEYARTDDVGKRQIQGHIRELQVGFYSDWDVVMRLSSGPLQVALTKVGIDLGIFRSLKESDTPITLAEIVKKTGASPRLLGRILRTQAAFGLIKETGPQEYTSSAFTDVFANSDAAGAVVQLFDISGPCTQILPDFLAERNYQDITSNKDCVFQKAFGSDLTMFEWMPQHPKHMESLGHLMALERPVSWVDHYPVLEELGGFPAPDKVLMVDIGGGFGQQSKALRAKFPDLPGRLIVQDIPQTLANAQPAAGIEFMEHNFFEPQPIQNAKFYYLRHVFHDWPDEQCVLILKQIIPAMGPESQILIDEMVIPSTGVPWQAAFTDLLMMNSLGGVERTRAEWDDLMEQVGLEIIQSKVYDSKEQAILVAVPKRT

SEQ ID NO: 11839 - protein, 251 aa, Corynebacterium efficiens YS-314
MEYGTPPPPSTSPTPDATCAHGLSNFPHCDEHHPRLPRQYAPQSGAELVLPRTSSPLTPHPHRTTCSHPVNPILTGYTEVLHRGKCQTHTSNPTGTGPRDLTRGELFSRGDYRWEGFHGTLDDGRGFYAQCLGARRRCTRERPVFFTRAVTAGVDGHRGVLTTRTSVNHAGERSITSSEIKVIHMAQGTVKWFNAEKGFGFIAPSDGSADVFVHYSEIQGNGFRNLEENQQVEFELGEGAKGPQAQQVRAL

SEQ ID NO: 11840 - protein, 319 aa, Escherichia coli O157:H7 EDL933
MKPENKLPVLDLISAEMKTVVNTLQPDLPPWPATGTIAEQRQYYTLERRFWNAGAPEMATKAYMVPTKYGQVETRLFCPQPDSPATLFYLHGGGFILGNLDTHDRIMRLLASYSQCTVIGIDYTLSPEARFPQVIEEIVAACCYFHQQAEDYQINMSRIGFAGDSAGAMLALASALWLRDKQIDCGKVAGVLLWYGLYGLRDSVTRRLLGGVWDGLTQQDLQMYEEAYLSNDADRESPYYCLFNNDLTREVPPCFIAGAEFDPLLDDSRLLYQTLAAHQQPCEFKLYPGTLHAFLHYSRMMKTADEALRDGAQFFTAQL

SEQ ID NO: 11841 - protein, 170 aa, Zea mays
LRMEVDRQPVQPAIHAPGVTGRRREDQMVPSMTSSFIRAETELTADFGHTSEDSRPEVPSNIHHLQARPEREETVDGGTGNAVRVHGNHHQQNLQNNMHRVLGIAPSISEASSSWTGRDGGVVPVWSPPAASGHSDPYAADEADISSRGYLDRHPQSHTMMNWSQLSQSL

SEQ ID NO: 11842 - protein, 478 aa, Streptomyces avermitilis MA-4680
MASAFEYAPAPESRSVVDIAPSYGLFIDGEFTEAADGKVFKTVSPSTEEVLSEIAQAGEADVDRAVKAARKAFEKWSALPGSERAKYLFRIARIIQERSRELAVLETLDNGKPIKETRDADLPLVAAHFFYYAGWADKLDHAGFGANPRPLGVAGQVIPWNFPLLMLAWKIAPALATGNTVVLKPAETTPLSALFFADICRQAGLPKGVVNIIPGYGDAGAALVEHPDVNKVAFTGSTAVGKAIARQVAGTEKKVTLELGGKGANIVFDDAPIDQAVEGIVTGIFFNQGQVCCAGSRLLVQESVQDELLDSLKRRLSTLRLGDPLDKNTDIGAINSAEQLSRITSLVDQGEAEGAERWSPACELPSSGYWFAPTLFTNVTQAHTIARDEIFGPVLSVLSFRTPDEAVAKANNSQYGLSAGIWTEKGSRILAVASKLRAGVIWANTFNKFDPTSPFGGYKESGFGREGGRHGLEAYLDV

SEQ ID NO: 11843 - protein, 147 aa, Zea mays
MVGRRRVALDLCGVRHTSISKLATGLSGFIAQKRRTVCVLKLSEVRLGNSDGYQHGQCWRDVYDAICQARRLIYIIGWSMFHTIHLVRDGHDDMALGDLLRRKSQEGVQVLLLVWDDPTSRRLLGIKMEGYMGTRDEETRRFFKHSS

SEQ ID NO: 11844 - protein, 142 aa, Campylobacter coli
MTQEQIQIIKDCVPILQKNGEDLTKEFYKIMFNDYPEVKPMFNMEKQASGEQPKALAMAILMAAKNIENLENMRSFVDKVAITHTKLNVKEEHYPIVGACLLKAIKVVLYADETTLKAWEEANKAIAQFYIDIEKEIYAKAK

SEQ ID NO: 11845 - protein, 453 aa, Ustilago maydis 521
MTLELPTETTHLSDSLLAEFARHTTIDIDNNVASIAAQHNLAHRRLLELDETKHTNRAQIDQQVVNEFQSLFHDMTSNQIIVLSTYSELLTNDKNKAAKLVEMCVAAAKQIKGGMWNGKQLSSTVLERISVDGLTGAESDEEKHQQLASDILTVHFGLEMLPNLLASGNLHAQTATSQAYNASATVRHARRFVALYELISGDTVDSSRVCIKIPTTIAGLQAMRFLSSGGILDENNVGGPLLEGKIQVLATTVFAVEQGLAAAQAAGATYVAPYINALAAHFFDAENPSAEDKQKALDAGGRSISEIIYPLQRCLRRMRQQNNKIKTKVMAASFINAEEAIELCGLDHVTLGAGIVQALATTKLTDGIVETMHQASDKMRIAEEKELERYCATLAAIKDGEAQGCGGWLKQGHRSHARLEIVLTQDERCRYMLADALARFTSAEVKLRQLFVV

SEQ ID NO: 11846 - protein, 497 aa, Brucella suis 1330
MTQENKMGKHENKAGGASLLHYGNFIAGQWQDAVGGEHITLKNPSDGSDLAPIARGAKADIDLAVVAARSALSGDWGKLTATERGRILHRISEEVLKNIDLLTDLESKDVGKPVTQARADVVALARYLEFYGASADKVHGDTLPYQNGFTVLSIYEPHGVTGHIIPWNYPMQILGRSLGAALAMGNAAVVKPAEEACLTILEFARIAEKAGLPKGALNVVTGFGAEAGAALCEHPDVNHISFTGSVRTGEVVQAAAAKNTVPVTLELGGKSPQIVFADADLDRALPFLVNAGIQNAGQTCSASSRILVERSIYEEVIARMSERYRALKVGPASADLSVGPVVSQRQKAIVDGYLDLAKESGLAIAAQGVLAEGAPEGGAYVLPTLIRDVPADHRLAQEEIFGPVQVILPFDTEEEAIAIANGTHYGLVCGIWTNDGGRQFRLAHAIHSGQVFINNYGAGGGIELPFGGVKKSGHGREKGFEALYGFASLKTISVYHG

SEQ ID NO: 11847 - protein, 138 aa, Glycine max
  misc_feature (122)..(122): Xaa can be any naturally occurring amino acid
ALSMISSPADTTINRAGAGLDAPFTGLKYMAGFPTRKTNNDLTSIASNGGRVQCMHVWPPVGKKKYETLSYLPDLDDAHIGKRQSNTLLRNGWIPCLEYALDHGFMYREHNMSPGYYDGRYXTMRKLPMLDCTVASKE

SEQ ID NO: 11848 - protein, 494 aa, Corynebacterium diphtheriae NCTC 13129
MTHTTQTLDDRIHELLQRIPTELFIAGQFQPAHNGATLSVTNPSDGSELATVASASEKEARAALDAAEKAQPTWAATPARERSEILRRAYDLVIEHKDDLAMIQSLELGRALPDSEAEVTYAAEFFRWFAEEAVRIRGDYRHNPTGNARIITHQQPVGPCLAITPWNFPLAMGARKLAPALAAGCTMILKPASKTPLTMLYLAQLLAEAGVPHGVVSVLPTANASVVSDLLHDARIRKLTFTGSTAVGQKLAAMAAEHSAAVSLELGGNAPYIVLDDADIDTAAQAVAVAKMRGAGQVCIAANRFLVHSSIAEEFTQRVVNIMRGFTQGPATAPGVDFGALSGDDQVSTVTTLVDDALSRGATKLLGDLPKGLPEHGSYYPATVLVDVPEDADIHCEEIFGPVVVISTFDDDDEAVARANDTKFGLAAYVFGSDLQRVLNVAERVDAGMIAVNKGALSDPAAPFGGVKESGLGREGGFEGIGEFLETKLISLPL

SEQ ID NO: 11849 - protein, 352 aa, Bacillus sp. KSM-K16
MKALVLEANQSFTIKDIETPVPKEDEALIKVAYCGICGSDLARYFDGKVHNYPIVLGHEFSGTVEAVGASVDSVAVGDRVVVAPLLPNKDDPFMQKGSPALSSSYSFLGSRENGAMAEYVVVKAENLLVLPETVTLAEAALIEPLTVAIHGIERIVLPAGEHVCVLGAGTIGIMTILALKARGAGKVTAIDINDEKLAFAKKIGADDTINSLKEDPVSYASKHGKPGAVIETAGVPSSQEQAVALVEKKGKIVFVGTASGDVTFPAATFEKILREELEITGSWMSYSGPFPGYEWQAAIDYIASGKIDVKPLIHDVFKLEDGDKPFQAMKDPDNHSIKLLYQIAENEGQVGK

SEQ ID NO: 11850 - protein, 143 aa, Zea mays
MAMAYKMATEGMNVKEECQRWFMEMKWKKVHRFVVYKIDERSRAVLVDKVGGPGEGYNELVAALPGDDCRYAVFDFDFVTVDNCQKSKIFFIAWSPAASRIRAKILYATSKQGLRRLLDGVHYEVQATDPSEMGFDVIRGRAQ

SEQ ID NO: 11851 - protein, 201 aa, Neisseria meningitidis Z2491
MMTLYSGITCPFSHRCRFVLYEKGMDFEIKDVDIYNKPEDLAVMNPYNQVPVLVERDLVLHESNIINEYIDERFPHPQLMPGDPVMRGRGRLVLYRMEKELFNHVQVLENPAATNKEQAKAREAIGNGLTMLAPSFSKSKYILGEDFSMIDVALAPLLWRLGHYDVKLGKSAAPLLKYAERIFQREAFIEALTPAEKAMRK

SEQ ID NO: 11852 - protein, 213 aa, Glycine max
  misc_feature (107)..(107): Xaa can be any naturally occurring amino acid
QLRRPPPPHANLGDSNYSFGEAEALSDEMEEESQYVAEILRIKDVLLNPEDEATEIGKAVNPLRKHGSKDIRQLARTLINGWKEMVDEWVKATTTTAITGSEEGTPXSVNPSVVDDDEEEGLPSPPLDEGAFFVTQAGSMELSQFFDGMDDDGNPRPTGPFSKNHENGRKPAFDSHVLEMRKLQPSHDTVINRDVKSQQAKGKQGCCHACEAK

SEQ ID NO: 11853 - protein, 1208 aa, Magnaporthe grisea 70-15
MEVRPQARVPPRPVLEEASMRTNYSISQNSATPPNYQHGGLKTENIRPAQPQKTRRDIPVSSSHVPLNPRLYEIREEAQSTPQSKRESQASTASYKSSSSNTFRKPKTHVGPWQLGKTLGKGSSARVRLARHTSTHQYVAVKIVAKSTCKMTQAGSLAKLDEIDSAAPEKVEGMRRMPIALEREVAILKLIEHPNIVKLYDIWENSNEIYLILEYVERGDLFDFISKHGPMPEEEAIFVFRQIMSALEYCHSYGICHRDLKPENILLKSNGQVKIADFGMAALHQGPRTPLWTFCGSPHYAAPELLREKAYRGEKSDIWSMGVILFAMMAARLPFDDEDMNLMFAKARKAIYHMPSFFSDEAKDLIHRLLQVDPRKRLSMRQMWQHPVVWKYGYLDELGGEGIPEVPNPRTRQEIKPLDLCDIDPQILRPIQSMWHTLSEDELVKKLISDDYRERQLENYDPSLTHSPSDYHHIRPPLWLTKVSTRQFMTNKANGQGRSISKFTVISNVTETGTGANLGTVRSYDPYKSPAVKQPQATHARIVIHRDSTDTDRNAASLGSTSHRRPRANSTGSWKRPARRSQLGSRILTPRSTASSVQSSRKFHARSRTSSRQKRAMDFSTARRKAAAAKLSNQQTLLGTDGSKTVTGWNIQCSSDPDIPGDTADSSNARLRSKDRLHEELRHFSSSIAKDCDEAFNSSLLSVSQFDGDRSRQGSPFSLSLGTPVSATPVTPVVTPTIPRPSARPWDSRPLPPTPPSSSHEKESAVNFGENPSILARRGQPPTQGYNLRSGPVAMTPTPSDRRVVSAPVHGGQYGGCATGKLPSIEEATPNTIQDEVNRSRIVSLPAKPVATAPTSNEARGLEFLSNAEQTIRIVHSPSAQRESGITRRPHPIQANAKPSKMVGTSTGPVKQASIDLYHADDSIISHRNAQLAQTSSHGSASTFAMRKKTSSWFKRLSRESKGSKGSLCDELDDTKSIDVPHGLTSGPIKNERDNSSINMSHRPPEKTSNKKKSFFLPFWRHKSEPRMSLAEPDFEESPSPETNAAVKSHKTSGNNLLNFGDAESAERMIKPQQNWLARLFRVKPVTRVICLSISRRRARQEVAILLRDWRKYGIRDVEVDKKRNVVFARLSSKNHLNIKEVALACEIITVIEHGKRNHLSIVRFTQEKGAASSFQRVVDTMRDVLGNRNLLVTDKSKAKMMIKTLNS

SEQ ID NO: 11854 - protein, 222 aa, Zea mays
  misc_feature (133)..(133): Xaa can be any naturally occurring amino acid
MAGLSLEHPWAFAFGLLGNVISFMTFLAPIPTFYRIYKSKSTEGFQSVPYVVALFSAMLWIFYALIKSNETFLITINAAGCVIETIYIVMYFVYAPKKAKLFTAKIMALVNGGVFGVILLLTLLLFKGSKRRXLLGWICVGFSVSVFVAPLSIMRRVIQTRSVEYMPFSLSLSLTLSAVVWFLYGLLIQDKYPTLPNDLDIIFQVIQMELYVPYMNKKQAAG

SEQ ID NO: 11855 - protein, 251 aa, Zea mays
MRKKLGTRFPAARIKKIMQADEDVGKIALAVPVLVSRALELFLQDLIDRTYEITLQSGAKTLNSFHLKQCVKRYSSFDFLTEVVSKVPDLGGADSCGDERVLPRRRKSNGSDPENDESRSSKMAIRNANTSPRGRGRGRGRGRGRPPTKRKEVGYVQFEDESSMFAEQGETLPGEGTVPEINSGNEITPQSTQPPLTAPAQATNSKVEEASTDHQSDWPMPDATGNIGVGPSGFGHLTVQVDEDEDYDNED

SEQ ID NO: 11856 - protein, 443 aa, Cytophaga hutchinsonii
MGSIKISNANIVNEGQIFQADIWIEEGLIKQIGKITAIADQTIDASGKYLFPGVIDDQVHFREPGLTHKATIYTEAKAAVAGGVTSYMEMPNTKPAAVTQELLEQKYEIAAKTSLANYSFFMGTTNSNINELLKTNPATVCGIKIFMGSSTGDMLVDNSAMLDEIFSQVKMLIAIHAEEDPIVKANTEKYKALYGDKLNATHHHLIRSEEACYASSSKAVALAKKHGTRLHILHISTAKELDLFTNTIPLEEKKITAEACIHHLWFSNEDYATKGNYIKWNPAVKTVADREAIWQAVLDNRIDVIATDHAPHTIEEKELPYIDAPSGGPLVQHSLVAMLEKYHQGKISLERIAEKMSHNVAKLFQIEKRGFIREGYYADFALVDLNKPWMVEKKNIISKCGWSPFEGYIFKSTVTDTFVSGNWVFHEGTFNEEVKGSRLTFQR

SEQ ID NO: 11857 - protein, 267 aa, Novosphingobium aromaticivorans DSM 12444
MGFDRGRRGRGRDKRDGFGDEGGFDPYGGGGFGGGGYDRGGFGGGDRGGFGGGGRGGFGGGDRGGFGGGDRGGFGGGDRGGFGGGGGGRGGFGGPRGGGGGGGMPAQVVGTGKGVVKFFNGQKGFGFIQREDGGEDVFVHISAVERAGLEGLAEGQQLEFNLVDRGGKISAADLQVVGDVIPVAAKPASPQRELTGEKASGTVKFFNAMKGFGFITRDDGQPDAFVHISAVERSGLRELNEGDKLEFDLEVDRRGKYSAVNLVPRQD

SEQ ID NO: 11858 - protein, 175 aa, Triticum aestivum
MAPTVMASSATSVVPFQGLKSTVGLPVSRRSNGASLGSVSNGGRIRCMHVWPIEGIKKFETLSYLPPISTEALLKQVDYLIRSKWVPCLEYSKVGFIFREHNASPGYYDGRYWTMWKLPMFGCTDATQVINEVEEVNKEYPDAYVRIIGFDNMRQVQCVSFIAFKPPGCEESGKA

SEQ ID NO: 11859 - protein, 146 aa, Rickettsia rickettsii
ANEAVINMLKEIGSSEYIPKYIAKAKDKNDPFRLMGFGHRVYKNYDPRAVVLKETCKEVLRELGQLDNNPLLQIAIELEAIALKDEYFIERKLYPNVDFYSGIIYKAMGIPSQMFTVLFAIARTVGWMAQWKEMHEDPEQKISRPR

SEQ ID NO: 11860 - protein, 122 aa, Anthoceros formosae
MIQPQTYLNVADNSGARKLMCIRILGASNRKYGNIGDIIIAVTKEAVPNMPLKKSEVVRAVIVRTCKEVRRDNGMTIRFDDNVAATTNQEGNPKGTRVFGPVARESRGYNFTKIIPLAPEVL

SEQ ID NO: 11861 - protein, 236 aa, Oryza sativa (indica cultivar-group)
MAGADVDVGTELRLGLPGGGGGAAEAAAKAAKRGFEETIDLKLKLPTAGMEEAAAGKAEAPAAEKAKRPAEAAAADAEKPPAPKAQAVGWPPVRSFRRNIMTVQSVKSKKEEEADKQQQQPAANASGSNSSAFVKVSMDGAPYLRKVDLKMYNSYKDLSLALQKMFGTFTATGNNMNEVNGSDAGTTYEDKDGDWMLVGDVPWQMFVESCKRLRIMKGSEAIGLAPRAKDKYKNKS

SEQ ID NO: 11862 - protein, 123 aa, Pinus taeda
MAVKKMVEAVFVVGLVVTMMNVWGAVPVEGAISCNQVVSAMTPCATYLIGNAATPAATCCPSIRGLDSQVKATPDRQAVCNCLKTQAKSYGVKLGKAANLPGLCKVTDLNVPISPNVDCSKVH

SEQ ID NO: 11863 - protein, 449 aa, Methanococcoides burtonii DSM 6242
MNPATGEVNEEIELYSEERINRTITKARTTFLEWKNLDISERAHYLKTAATQLRKDKDELGRIITIEMGKPIKESVPEVEKCAWALEYYAENAENFLAPEAVETDALESGVSFEPKGVILSIMPWNFPFWQALRFAAPALVGGNTVILKHASSVPMCALAIEKVFADAGLPEGAFQTLIIDGRTASELIARDEIAAVTFTGSLTAGRKVAEAAGRNMKKAVLELGGSDPFIVLDDANVEMAAKAGVNSRFQNGGQSCIAAKRFIVTEAVADEFLRIFIGSARKLQVGDPMDPQTDVGPLVNAQQVDIIDAQVKDSVDKGAELLLEGGRLDRLGSFYAPVILSNVNENMRVLKEETFGPVAPVIIVKDEEEAIRVAGNSDFGLGASLWTEDREHAMEIEKHIESGILSVNSMVASDPRLPFGGVKKSGIGRELYKYGLYEFMNIKSIKVY

SEQ ID NO: 11864 - protein, 529 aa, Triticum aestivum
MAAAVKTSGGFCNTQQQWLHSTRDLFLHGSTRSNAKECKSRKTKKPTSLRVEATSTKVELDFNDPSWKQKFQEDWDNRFNLPRITDIYDLKPRPTTFSLMKQRTPTGDEDSTPMDMWKGYVNNDDRALMKVIKYSSPTSAGAECIDPDCSWVEQWVHRAGPRKDIYYEPNEVKAAIVTCGGLCPGLNDVIRQVVFTLETYGVKNIVGIPFGFRGFFEKGLKEMPLSRNLVENINLAGGSFLGVSRGGAKTSEIVDSIQARRIDMLFVLGGNGTHAGANAIHDECRKRKLKVSVVAVPKTIDNDIPLMDKTFGFDTAVEEAQRAINSAYIEARSAYHGIGLVKLMGRSSGFIAMHASLSSGQVDVCLIPEVSFALDGEYGVLQHLEQLIKNKGFCVVCVAEAAGQELLQNSGATDASGNAILSDIGVHMQQKIKTHFKGIGVHADIKYIDPTYMVRACRANASDAILCTVLGQNAVHGAFAGFSGITSCICNTHYVYLPVTQVITAPKRVNNKGRMWHRCLTSTGQPDFR

SEQ ID NO: 11865 - protein, 177 aa, Triticum aestivum
  misc_feature (99)..(99): Xaa can be any naturally occurring amino acid
  misc_feature (112)..(112): Xaa can be any naturally occurring amino acid
  misc_feature (130)..(130): Xaa can be any naturally occurring amino acid
  misc_feature (134)..(134): Xaa can be any naturally occurring amino acid
  misc_feature (149)..(150): Xaa can be any naturally occurring amino acid
MAPTVMASSATSVAPFQGLKSTAGLPVSRRSNGASLGSVSNGGRIRCMQVWPIEGIKKFETLSYLPPLSTEALLKQVDYLIRSKWVPCLEFSKVGFIFXREHNASPGYYDGXRYWDNVELPMFGCTDATXVINXVEESRRIPDPYVRIXXSTTCSRECVNLTLQATGARSGKAKSHH

SEQ ID NO: 11866 - protein, 427 aa, Triticum aestivum
  misc_feature (235)..(235): Xaa can be any naturally occurring amino acid
  misc_feature (320)..(320): Xaa can be any naturally occurring amino acid
  misc_feature (362)..(362): Xaa can be any naturally occurring amino acid
  misc_feature (368)..(368): Xaa can be any naturally occurring amino acid
  misc_feature (377)..(377): Xaa can be any naturally occurring amino acid
  misc_feature (385)..(385): Xaa can be any naturally occurring amino acid
  misc_feature (409)..(409): Xaa can be any naturally occurring amino acid
TRLRAAARSTSDVKPEEFAMLVRDVPVPPPNQTIKDSVDSYFRALHPDTFYKAMVVTDITKADQIFQEIEGHRHKIAHAEAVYAESKTSNRPEGTRPTHRTGFLGLIGKKVDTLEYCNEKIKELLPKLEDEQKSTLSEKQQRAAFVFFNSRAAAASASQTLHAQMFDEWTVTEAPEPRAVIWTNLPRKIYDRQTRQTVVYLIVFVTVVFYMIPITAISAVTTLEQLRKKLPFLKXVVDQPLLKTVLQAYLPQIALIVFLALLPTLLVFLSKSEGIPSQSHVVRASSGKYFYFIVFNVFIGYAIGSSLFSALQKVIENPTXIVTTLGSRLPGNATFFLTFVALKFFVGYGLELSRLVPLINFXLKRNYXCKTEDEVKXGWAPRELXYTTRVPNDLLIVTLVMCYSVIGPXLILHLGVAYLALGWLITK

SEQ ID NO: 11867 - protein, 215 aa, Bdellovibrio bacteriovorus HD100
MKFFIDTAEIEEIRQANLRGWVDGVTTNPSLIAKSGKDFHTVIKEICKEITGPVSAEVISLQHEEMVREGKELAKLASNVVVKIPMCEDGMIAVKKLKSEGIKTNVTLVFSPMQALLAAKAGATMVSPFVGRLDDIGVEGMQMVDQVIQMYRNYDFETEVLVASVRSPMHIQLAAEMGADIATIPFKVMQSMTHHPLTDKGIKMFMDDWNKAQKK

SEQ ID NO: 11868 - protein, 648 aa, Glycine max
  misc_feature (214)..(214): Xaa can be any naturally occurring amino acid
  misc_feature (329)..(329): Xaa can be any naturally occurring amino acid
  misc_feature (354)..(354): Xaa can be any naturally occurring amino acid
  misc_feature (372)..(372): Xaa can be any naturally occurring amino acid
  misc_feature (386)..(386): Xaa can be any naturally occurring amino acid
MSSAEKPSSKGQAWFCTTGLPSDIVVEVDDMTFHLHKFPLMSKSRKLHLLITQQEAASNSTVPQQQQQQQETEDEDEIVEEQCHVTFTGFPGGSEAFEMAAKFCYGVKIDLTPSNVAALRCAGEFLEMTEDYSEDNLVSKTEGFLSQHVLKNLKDSVKTLKSCDSLMPMAENLGAAQRCVDSVVSRASSADPALFGWPVSDATSVSKQVLWGGXTATADPALAPGPVSLGFEDLALLRLPLFKRLILAMRSAGLSPEIIETCLMYYAKKYIPGVSRSNRKPLPSSSSSSSSVATEAEQKELLETVVSNLLPSSSSSSSAATEALFEEIXRLVSNLPLACSYALEKKIGLHLEKXSLDDLLMPSYSYLNETLXDVDCAARSISHFLXLLKQKTSRNGGKRRARRSPGLMLVGKLIDGYLSEIASDANLKPEKFYNFAISVPDEARLFHDGLYRAVDVYLKAHPWVLEEEREKICGLLDCQKLTLEACTHAAQNERLPLRAVVQVLFFEQLQLRQAIAGTLMAAEAAAEPGRQSAALEREAEDGRGEGLGLEHVQERNGTWRVAVRENQVLRLDMDSMRTRVHQLERECSSMKRVISKFDKFAASGGGWRASLGRKFGCKFKTQVCDSHESTAVDTRKGRHHQQHHPHHD

SEQ ID NO: 11869 - protein, 118 aa, Glycine max
  misc_feature (19)..(19): Xaa can be any naturally occurring amino acid
  misc_feature (40)..(40): Xaa can be any naturally occurring amino acid
MATLDSDVPMVPAGEPSSXSAGPSSKKPKRFEIKKWNAVXALWAWDIVVDNCAICRNHIMDLCIECQANQASATSEECTVAWGVCNHAFHFHCISRWLKTRQVCPLDNSEWEFQKYGH

SEQ ID NO: 11870 - protein, 258 aa, Triticum aestivum
MAMEARMKGTVKWFNDTKGFGFISPDDGSEDLFVHQSSIKADGFRSLAEGEVVEFAVSEGDDGRTKAVDVTGPDGSFVQGGAGGGGGGGGFGSRGGGGSRGGGGFGGRGGDGSGGYGGGYGGGGGGGWGGQRRSGGGGAGGACFKCGEPGHMARDCSVNGPAGGGGGGGCYKCGEQGHIARDCFNGGAGGGGGGYGGGGGGNCYNCGEPGHIARDCPTSSGFGGGGGGGRFGGGGGGGNDRSCYNCGEPGHISRDCTK

SEQ ID NO: 11871 - protein, 111 aa, Arabidopsis thaliana
MIRCGQKTIIFLINNGGYTIEVEIHDGPYNVIKNWNYTAFVEAIHNGEGKCWTAKVRCEEELVKAINTATNEEKESFCFIEVIVHKDDTSKELLEWGSRVSAANSRPPNPQ

SEQ ID NO: 11872 - protein, 476 aa, Brucella suis 1330
MYPNLTLIVGGEERNKGSAGTLCLTDPADGRELTIAPRAGRAEALQAAAAEKGFAEWSALSALERSKIMRRAADIMRERADAAARIMSMEQGKPLAEARGEWLGSADLLDWFAEEGRRVYGRIVPSRAPNIQIQVLKHPIGPVAAFTPWNFPAWNTMQKVAPALGAGCSVVIKPASDTPGTAWLIGKCLLEAGLPPKAVSVIWGTTSELSDALIKAPEFRKVSLTGSTRVGRIVAAQAGEYLKKVTMELGGHGPVIVAADADLDHLIPLAVQWKFRNCGQVCVSPTRFIVEASIHDEFIRRFSEKARELKVGKGVEEGTQMGPLTSQNQLETVLSMVEDALTKGAKIETGGNRIGDTGNFYEPTILSGMTAEMLAMNEEPFGPLALVMRVHSLDEAIAESNRLPVGLGAYLFTSSMTTAHRVQNHLQAGMLGVNHFALALPETPFGGVRDSGFGSEGGLEGIEAYLTTMTVTTMMV

SEQ ID NO: 11873 - protein, 1083 aa, Streptomyces coelicolor A3(2)
MSSDRDGIRGGWATPGDDQPDAESSVETTGEFTIDYAPPAWYTQNASGDGGQGESEGADPPGGSAGSPPASAPTAPPAPRGPVPPLPGLTPPPHATHHGPSYVPAPAPGAPFTPPPPAPAPGAAFTPPPPPGPGAPFTPPAPPSGGPAGVPKLPVGSGFEPQPSPSQRSAPPEPEPEPEVRTPEPEPKAVAEPAPAADLASPAALPSFPAGGFQLQAPVPPPPAEEPGAAAEPEPEPDREPDTGDLDNGDLESGATMRFSAVALKREIAERAAAEDTAGEGPAAGADEARDTPDEPFVSTGFTDADTDAETDVDTESDFESVSDQAPDAESGGGHGDVADPRLGGSAPDAEPEPEPESEPVVLAAVAESESESAERVGDEPEDSVPTADVPVDAVPDDAAPPADSVPQDAVPQDATPPAPEGMPPLPPSYPPVAPAAAHQWPAQPQPPTQPQTAPAPPEQPGVAAQQPPFQPQAPQPAPAGWDAPPAPQPGYGFPQPGAQAPQPQPHSPAQPPGGYGFPQAPQAPHGPSPQQQPYPGVPQQQAPQAQGGGQAPPAQPGQPAQPGQPMQPGQPGQSGQPGQAPSAPQAAPHPPQAPPAQQPEYQPQAQQPQPQPQPQPYQQPADPRLGAAWPQPMQHDQRQATNPGAAPLGYTAAVELSSDRLVNNKRQKAKSSRPAAGGSRFKLGGKKEEAERQRKLDLIRTPVLSCYRIAVISLKGGVGKTTTTTALGSTLATERQDKILAIDANPDAGTLGRRVRRETGATIRDLVQAIPYLNSYMDIRRFTSQASSGLEIIANDVDPAVSTTFNDEDYRRAIDVLGQQYPIILTDSGTGLLYSAMRGVLDLADQLIIISTPSVDGASSASTTLDWLSAHGYADLVSRSITVISGVRETGKMIKVDDIVGHFQTRCRGVVVVPFDEHLSAGAEVDLDMMRPKVREAYFNLAAMVAEDFVRHQQSHGLWTSDGNPPPVAAPPMPGQQTPGQQMPGQPMPGQPMPGQQMPPQQGQPMPPQPGQPVPGQPYPPQPAPGQQQPYPQPGYNQPYAQPGYGYPQPGQPGHPGQPQQQPQQQQQPQQGQTPPPPPPQQ

SEQ ID NO: 11874 - protein, 488 aa, Burkholderia cepacia R18194
MQTQLFIDGRFVDAVDRGTIDVLNPHDGSVITKIAAATAADVDLAVEAATRAFPKWSALPAAERGRLLLRLADAIEANAEELAQLESLDTGHPIRDSRALDVPRTAACFRYFGGMADKLQGSVIPVETGFLNYVQRAPIGVVGQIVPWNFPLMFTSWKMGPALAAGNTVVLKPSEITPLSTLRIVELMAEVGFPAGVVNIVPGYGHTAGQRLAEHPGVGKIAFTGSTATGRRIVEASQGNLKRVQLELGGKGANIVFDDADLDAAINGAAWAIFHNQGQACIAGSRLVLHERIADAFLERFVALASSIRIGNPLDANTEMGPLTSKQHLDRVLSFVDVAREQGGRVLTGGSAPQDPALANGYYVRPTVIEAKSAADRVAQEEVFGPFVTVLRFGSDDEALAIANATEYGLGSGLWTKDLSRAHKMASQINAGMCWINCYKRVNPGSPFGGVGQSGYGREMGFEAMHDYTEARSVWVNVDGNVPPHFKR

SEQ ID NO: 11875 - protein, 501 aa, Zea mays
  misc_feature (366)..(366): Xaa can be any naturally occurring amino acid
  misc_feature (393)..(393): Xaa can be any naturally occurring amino acid
  misc_feature (400)..(400): Xaa can be any naturally occurring amino acid
PTSTAAGGAGAPPQGVARPPGPRPLPLIGNLLDLRRAPGSLHHTLARLARAHGAPVMRLDLGLVPAVVVSSRDAAREAFAAHDRRIAARPVPDSKRALGFCDRSMLSLPSSAPLWRTLRGVMAAHVLSPRSLAASRAARERKVADLIGYLRARAGTVVDLKEAVYGGVANLVSTAMFSIDVVDVGAAESSSSSSSAAHGLQELLEELMQCMAQPNVSDLFPFLSALDLQGCRRRVAVQLGQVLQVLDDITDRRLASSSSSSTSSKGGDRRGDFLDILLDLQSTGKITRDNVTLTLFDIFAAGSDTMALTVVWAMAELLRNPGVMARLRAEVRDALGGRDAVEEARRGGPCRSWQAVVREAMRLHPXAPVLLPHKAVEDGVQIGGYAVPRGCTXVIFNSWXAIMRDPAAWERPDEFLPERFLARDLDFRGKQLEFVPFGSGRRLCPGVPMAERVVPLVLASLVHAFQWQLPAGMSADQVDVSDKFTTTSVLAFPPIKAVPLL

SEQ ID NO: 11876 - protein, 201 aa, Escherichia coli CFT073
MALHDENVVWHSHPVTPQQREQHHGHRGVVLWFTGLSGSGKSTVAGALEEALHKLGVSTYLLDGDNVRHGLCSDLGFSDADRKENIRRVGEVANLMVEAGLVVLTAFISPHRAERQMVRERVGEGRFIEVFVDTPLAICEARDPKGLYKKARAGELRNFTGIDSVYEAPESAEIHLNGEQLVTNLVQQLLDLLRQNDIIRS

SEQ ID NO: 11877 - protein, 238 aa, Lycopersicon esculentum
MADPDTTRTVVGIIGNVISFFLFLSPGPTFVQILKAKSVMEFKPDPYIATVLNCAVWVFYGMPFVHPDSLLVITINGFGLAIELLYVSIFFIYSDWSKRQKIIIALVIEAIFMAILIFVTLTFLHGTKDRSMLIGIVAIVFNIIMYTSPLTVMKKVITTKSVKYMPFYLSLANFANGIVWACYALLKFDPYILIPNGLGSLSGLVQLILFAAFYRTTNWDEDEKEVELSTSKSNKSDV

SEQ ID NO: 11878 - protein, 102 aa, Glycine max
  misc_feature (22)..(22): Xaa can be any naturally occurring amino acid
  misc_feature (90)..(90): Xaa can be any naturally occurring amino acid
  misc_feature (93)..(93): Xaa can be any naturally occurring amino acid
YIRVCLILAVLGCSDSFLSQQXVSVLELISQLVHRRSDWRALHQYADNHLAYQRLAIDDPAYGDQLLYNEDNTCVATVHGEIHTYEELRXTVXNHTFRTGSD

SEQ ID NO: 11879 - protein, 500 aa, Zea mays
MSSSPSFGLLAVAALLLALSLAQHGSLAATVGPRVIVVGAGMSGISAAKRLSEAGITDLLILEATDHIGGRMHKTNFAGINVELGANWVEGVNGGKMNPIWPIVNSTLKLRNFRSDFDYLAQNVYKEDGGVYDEDYVQKRIELADSVEEMGEKLSATLHASGRDDMSILAMQRLNEHQPNGPATPVDMVVDYYKFDYEFAEPPRVTSLQNTVPLATFSDFGDDVYFVADQRGYEAVVYYLAGQYLKTDDKSGKIVDPRLQLNKVVREIKYSPGGVTVKTEDNSVYSADYVMVSASLGVLQSDLIQFKPKLPTWKVRAIYQFDMAVYTKIFLKFPRKFWPEGKGREFFLYASSRRGYYGVWQEFEKQYPDANVLLVTVTDEESRRIEQQSDEQTKAEIMQVLRKMFPGKDVPDATDILVPRWWSDRFYKGTFSNWPVGVNRYEYDQLRAPVGRVYFTGEHTSEHYNGYVHGAYLSGIDSAEILINCAQKKMCKYHVQGKYD

SEQ ID NO: 11880 - protein, 449 aa, Oceanobacillus iheyensis HTE831
MEDLFELDKKHFIHPTSSIIQQQTDGAKSIMAKGDGIYVTDTNNKEYIDAVSSLWNVNIGHGRTELAEVASEQMKKLAFSSAFSTFSHEPAIRLAKKISELTPQGLNAVFFTSGGSESNDSAVKLSRHYWKIQNKASKRKIISLKRGYHGVAAASTSITGIPEFWDMAGHLMNDFLHAETPYRSTTEKAIESLQSMIEQETADTIAAIFVEPVQGAGGVLIPPADYLEAVREICDFYNILFIADEVITGFGRTGTMFGMENWNVVPDAMTFAKGVTSGYIPMGGVVVSDHIHTVLKEKSKGTLFHGFTYSGHPTAAAVALKNIEIIEKESLVTNAKERGLELQNGFQKIKKESSIVGEVRAIGLIGAIELMQDSATGQPFTPDVGVTPAVINALHERGVISRGVTYDGSNILCFAPPLIITKQEVNELISRISDAILFVQHQLGVSQNY

SEQ ID NO: 11881 - protein, 312 aa, Mesorhizobium loti MAFF303099
MTDYTKLIDAETWAFIERTNSYYPPDTIDYTITQQREIYDRMCREFFAGYPQGVTVETSAIATPTHDIPIRIYRSAPQPAATVLCIHGGGFMLGGLDSHDDVCAELCARTGYEVVSVDYRLAPEHLHPAAFDDAMTAFAWVASTRDRPILLCGDSAGGNLCAAVSHATRGHVKRPVGQVLIYPGLGGDRSKDSYVTHAEAPMLTMRDLEFYKHIRTGGQDRSGDATLAPLADTDFANLPPTVLVTAQCDPLSSDGETYRDRIIAAGGRATWFEEPGLVHGYLRARHTVGRARESFTRIVGAAAALGQGAWLW

SEQ ID NO: 11882 - protein, 503 aa, Ralstonia metallidurans CH34
MRDRTLVLSVLIVASCGLGYELIAGALSSYLLGDSILQFSSIIGCYLFAMGVGSWLSRYVKDEDVLTRFIDIEILVGLLGGISAALLFVVFAWLSAPFRTALYALVFVIGMLVGMEIPLVMRILNARRAQFSDLVSRVLTFDYLGALAVSLVFPLVLAPRLGLSRTGFLFGMLNVAVALFTLRIFRDEVSRTTLRTLRAGMVLAVLTVGFAGSNYLTHWAERGLFGDEIIHSETTPYQRLVITRWKDDLRLYINGNLQFSSRDEHRYHEALVHPVLQALPWARRVLVIGGGDGLALREILKYRNIEHVTLVDLDPAMTTLFSRSEPLRALNHGSLTDQRVTVVNADAAQWLEQNQDSFDAIIVDLPDPSNFGLGKLYSVPMYRLMSRHLAEKGYAVVQSTSPYYAPRSFWDIDATLREAGLHTWPYHTYVPSFGEWGYILVGKRNDYTPPTRYDVPMKFLDGDTTALMFRFPADMAPRQGEPNRLNEQTLVHDFERDWRNVIR

SEQ ID NO: 11883 - protein, 484 aa, Oceanobacillus iheyensis HTE831
MAELKAITTYQMYINGEFVNASNNETLEVTNPATEEIVSTVPKASLEDTRRAIDGSAKAQKDWANLPSSKRASYLFAISKEIRSNIDEYAKIISEEMGKPLDQAVVEVSVTADYFEYIAGWARKYEGEIVPSDREKENILVFKQPIGVVAGILPWNFPFFLIARKAAPAILTGNTIVLKPSSVSPNNALAFAKILDKVGLPKGVINIVTGAGSIVGEELSKNEKIGMISLTGSTEAGSRVMEKASKNITKVSLELGGKAPSIVMEDADIDLAVKSVLDSRIINTGQVCNCTERVYVHEDVADEFIEKITKAMSNVSYGNPLGNEQIDMGPLSNEAGLKNVEDMVKRAVENGATVLTGGNRVNTEAGYYYEPTVLSNVDNSFEIMKEEVFGPVLPIATFTSLDEAIELANDCQYGLTSAIFTNNVNYMMRASNELEFGETYVNRESFEAIQGFHAGWKKSGIGGADGKHGLGEFLQTHVVYIQYK

SEQ ID NO: 11884 - protein, 1233 aa, Neurospora crassa
MDNRTGSRVSVRQPLGDATNRANIAAMQTSSRPKLEANAKSWKNTNRSKSNPPIITDIPLVQHHIVTIPSPVAVPDVPSMSRLRHPSSLQQMNTQASDARRVSQFSNVSSNASITRLQKTHIGPWQLGKTLGKGASARVRLARHRTTHQLVAIKIVAKSTAHVTQATSMANLDRVDYRKPSISTDGVRRMPLAIEREVAILKLIQHPNIIKLHDIWENRQDIYLVTEYVEKGDLFDFINWNGSLNEEEAIFYYRQIMSALEYCHSFNICHRDLKPENILLKADGQIKIADFGMAALHQEPTHHLKTACGSPHYAAPELLKHQPYKGSAVDIWAMGVILFAMLAGRLPFDDSDMDAMLQRARKGYYKMPSELSREAKDLIRKILVVNPLQRITMKQMWKHPLIKKYDYVDDYQQSDGQPQDVLRNADIGPIPEKEVDPQILRQLKAMWHAYSEAQIKEKLGQTKPNDQKVFYWLLYRHRHAQLENYNNDIPISKSDFHHLKPPNWGKRISTCEFTQSSRNGHGRSISKFTVISNVAEVNDSGTVRSYDPYRASQVLRNCASEASHARIIVHRNPSEPGTRSNTSNIAHSYNSYTSFGGSFRRRPRMSSQRTNTTGRLRSSMGSMGSLRSLNGTPRVRANNRSRRGVDFSSIRARDRLQARVRENVRAAPSSAAGSSVVDRRNSCRQQQRQKAAIIHSADNTLKSRDETLIWDEELQQLGYRIAMDCDEAFRSSLVGSETSVAVSGSRENSPFSLSLGASSPSPQPESPTALPLQQQAVNHSWVNRPLPPIPSIEISPVVNQTYGVNVVRPAPLRIERLSLGNCASASQTLVPDRRIVSEPVYTTPANRDPRQLPSINETASEDWTRNASTRWASPDTPSPAENNKALNYLARAENTIRVVNSPTAGPVPMPEPLNVRKVSKATPAASGESNYRKTALSNIPPDFKENCPPGTQQEEQGVGDNTVNAGAPAKKRVPSWFRRSSKDNTSFATTANTAAIHNDSTIISDIHQQLDGLESQSSARPDPYPNKKKAFSLAFWKGSKSENSSPTASTFDISTSKEGGGKKHKSSKSESRVVSGATSQSWGEGEGVGRQIEVQQNWLARLFRVKPATRHLCFSMPRRRARQEVAILLREWRQFGIKDVEVDKERNIIFARVGAQNVHNVKEVSFAIEIMMVIEHGKRNQRTQLSIARFTQEKGAASSFHKVVDAINVEFRNRGLLVTDKRKTQMMIKTLNS

SEQ ID NO: 11885 - protein, 427 aa, Azotobacter vinelandii
MPFTANRDFQRDPRLVVAARGNYLTDAEGRQVYDSLSGLWCCGAGHGRREIAEAVTRQLGTLDYSPGFQFGHPLSFRLAEKIASLTPAGLDHVFFTNSGSECADTALKIARAYWRLKGKAGKTRLIGRARGYHGVNLGGTAVGGIGGNRKAFGPLSDVDHLPHTLLAENAFSRGLPAHGGAALADALLGLIELHDASNIAALIVEPMSGSAGVLVPPEGYLARLREICDRHEILLIFDEVITGFGRTGALFGAERFGVTPDILNLAKQLTNGAAPMGAVLVKGEIYDTFMRQELPEHAVEFAHGYTYSAHPVACAAALATLELLERDNLLQRAAELAPHFENALHGLRGARHLLDIRNCGLAGALQLAPRDGDALVRPFEAAMRLWRRGFYVRCGGDTLQFGPPFSSSAAELDRLFDAVGEVLGGLD

SEQ ID NO: 11886 - protein, 350 aa, Bacillus cereus ATCC 10987
MKALLWHNQRDVRVEEVPEPTVKPGAVKIKVKWCGICGTDLHEYLAGPIFIPKEEHPLTHVKAPVILGHEFSGEVVEIGEGVTSHKVGDRVVVEPIYSCGKCEACKHGHYNVCEQLVFHGLGGEGGGFSEYTVVPEDMVHHIPDEMTYEQGALVEPAAVAVHAVRQSKLKEGEAVAVFGCGPIGLLVIQAAKAAGATPVIAVELSKERQELAKLAGADYVLNPATQDVLAEIRNLTNGLGVNVSFEVTGVEVVLRQAIESTSFEGQTVIVSVWEKDATITPNNLVLKEKEVVGILGYRHIFPAVIKLISSGQIQAEKLITKKITVDQVVEEGFEALVKDKTQVKILVSPK

SEQ ID NO: 11887 - protein, 484 aa, Corynebacterium glutamicum ATCC 13032
MTATFAGIDATKHLIGGQWVEGNSDRISTNINPYDDSVIAESKQASIADVDAAYEAAKKAQAEWAATPAAERSAIIYRAAELLEEHREEIVEWLIKESGSTRSKANLEITLAGNITKESASFPGRVHGRISPSNTPGKENRVYRVAKGVVGVISPWNFPLNLSIRSVAPALAVGNAVVIKPASDTPVTGGVIPARIFEEAGVPAGVISTVAGAGSEIGDHFVTHAVPKLISFTGSTPVGRRVGELAINGGPMKTVALELGGNAPFVVLADADIDAAAQAAAVGAFLHQGQICMSINRVIVDAAVHDEFLEKFVEAVKNIPTGDPSAEGTLVGPVINDSQLSGLKEKIELAKKEGATVQVEGPIEGRLVHPHVFSDVTSDMEIAREEIFGPLISVLKADDEAHAAELANASDFGLSAAVWSKDIDRAAQFALQIDSGMVHINDLTVNDEPHVMFGGSKNSGLGRFNGDWAIEEFTTDRWIGIKRS

SEQ ID NO: 11888 - protein, 345 aa, Glycine max
SSQLRRPPPQKKKKKGLTRRKNLPLTVYNKLSIAVAFSLPLRIFFFFFSSNPKSWPRKLTTKVIELNTLKAMAQSHGSILTRSVWSSNLESEFDLIRSVIDSFPLISMDTEFPGVVVRPDAGDPSFRHRQPVAHYAVLKANVDRLHLIQIGLTLSDNAGNLPTLGTSNAFIWEFNFKDFDVARDAHAHDSVELLRRQGIDFEKNRDFGIDSFRFAELMMSSGLVCDDAVSWVTFHSAYDFGYLVKLMTHRTLPEELREFLRLVRVFFGDRVFDVKHLMRFCSNLHGGLDRVCQSLKVERVIGKSHQAGSDSLLTLHAFQNIRENYFDKADGLVQYAGVLYGLEVF

SEQ ID NO: 11889 - protein, 363 aa, Shigella flexneri
MSKNYHIAVLPGDGIGPEVMTQALKVLNAVRNRFAMRITTSHYDVGGAAIDNHGQPLPPATVEGCEQADAVLFGSVGGPKWEHLPPDQQPERGALLPLRKHFKLFSNLRPAKLYQGLEAFCPLRADIAANGFDIQCVRELTGGIYFGQPKGREGSGQYEKAFDTEVYHRFEIERIARIAFESARKRRHKVTSIDKANVLQSSILWREIVNEIATEYPDVELAHMYIDNATMQLIKDPSQFDVLLCSNLFGDILSDECAMITGSMGMLPSASLNEQGFGLYEPAGGSAPDIAGKNIANPIAQILSLALLLRYSLDADDAASAIERAINRALEEGIRTGDLARGAAAVSTDEMGDIIARYVAEGV

SEQ ID NO: 11890 - protein, 460 aa, Lycopersicon esculentum
MDSSWEASVTDSINAIYLLFSAYLVFVMQLGFAMLCAGSVRAKNAMNIMLTNVVDAVVGSLSYYLFGFAFAFGDSNPFIGASYFALKDIPSSSYDYSFFLYQWAFAIAVAGITSGSIAERTQFTAYLVFSFFLTGFVYPVVAHWLWSSNGWLSPNSTYLLFGSGAIDFAGSGVVHLVGGIAGFWGSIVEGPRVGRFDAFGNPVKMRGHNATLVVLGTLLLWFGWFGFNPGSFNKILVAYPHMADQGNWTSVGRTAVTTTLAGSTAGIVTLFGRRLLVGHWDAMDVCNGVLGGFVAITSGCSVVEPWAAILCGFCAAWVLIGLNILALKFKFDDPLEAAQLHGGCGAWGLIFTGLFAKEEFVLQAYNSGKTQIIRPSGLILGGGWGLFGAQIVELLSIVVWVSLTMGPLFYLLQKLGILRISSDEEVAGLDISSHGGYAYDASQEESNARFYGEYLRMQQQ

SEQ ID NO: 11891 - protein, 271 aa, Ulva intestinalis
MLRAIAQRARGSALQCAAPGTEWASCVRGSSGFTAYDVGESTNIKWHETMVSRGDKERLLNQRGCVLWFTGLSGSGKSTVACTLEHALNARGKMTALLDGDNVRHGLNSNLTFTAEDRTEHPPHRRSEQALCRRWRPPLRELHLRPIAPTRPVRERCAGDFVECYMKIPIELCEQRDPKGLYKKARAGLMKGFTGIDDPYEEPLEPELTITVREEGSDMNSPEAMAKQIFDYLEAKGFLKGPAVASSGGSCARVARWGGHGRRRGRQRLAW

SEQ ID NO: 11892 - protein, 126 aa, Brassica napus
  misc_feature (55)..(55): Xaa can be any naturally occurring amino acid
MERLNARLAVLSAHLEVSDPMPAATEPWCKSIAGPLAGNLTIVDERTGKKYQVPXVSEEGTVKSIDLKKITSGAHDKGIKLYDPGYLNTAPVRSSVSCTDGDEGTLRYRGYLIEELGESSTFFWGA

SEQ ID NO: 11893 - protein, 287 aa, Zea mays
  misc_feature (100)..(100): Xaa can be any naturally occurring amino acid
  misc_feature (114)..(114): Xaa can be any naturally occurring amino acid
  misc_feature (161)..(161): Xaa can be any naturally occurring amino acid
  misc_feature (177)..(177): Xaa can be any naturally occurring amino acid
  misc_feature (192)..(192): Xaa can be any naturally occurring amino acid
  misc_feature (205)..(205): Xaa can be any naturally occurring amino acid
  misc_feature (221)..(221): Xaa can be any naturally occurring amino acid
  misc_feature (232)..(232): Xaa can be any naturally occurring amino acid
PFPQPRRVASYDPKLSLLRRSQPWPKNYPTVSAEYSEAVREGQAASLRALIAEKSCAPLMLRLAWHSAGTFDVSSRTGGPFGTMKHQSELAHGANAGLDXIAVRLLEPIKEEFXILSYADFYQLAGVVAVEVTGGPEIPFHPGREDKPQPPPEGRLPDATXGSDHLRQVFGKQMGLXSDQDIVALSGGHTLXGRCHKERSGFRGXPWTTNPFGSFDNSYFXELSEWVIKEGXLLQLPSDKALLSDPVFPPSCREICWADEKAFFDDYKEAHLKLSRTGVSNHWLHNV

SEQ ID NO: 11894 - protein, 527 aa, Zea mays
MAMAMMAMRRAVALGARHIPAAAASSFRVVSLRHMSADAGAAMEKIRAAGLLRTQGLIAGQWVDAYDGKTIEVQNPATGEVLANVSCMGSRETSDAIASAHSTFYSWSKFTASERSKALRKWYDLIISHKEELALLMTLEQGKPMKEALGEVNYGASFIEYFAEEAKRIYGDIIPPTLSDRRLLVLKQPVGVVGAITPWNFPLAMITRKVGPALACGCTVVVKPSEFTPLTALAAADLALQAGIPAGALNVVMGNAAEIGDALLQSTQVRKITFTGSTAVGKKLMAGSANTVKKVSLELGGNAPCIVFDDADIDVAVKGSLAAKFRNSGQTCVCANRILVQEGIYEKFAKAFIQAVQSLKVGNGLEESTSQGPLINEAAVQKVEKFINDATSKGANVMLGGKRHSLGMSFYEPTVVGNVSNDMLLFREEVFGPVAPLIPFKTEEEAVHMANDTNTGLAAYIFTKSIPRSWRVSESLEYGLVGVNEGIISTEVAPFGGVKQSGLGREGSKYGIDEYLELKYICMGNLG

SEQ ID NO: 11895 - protein, 174 aa, Glycine max
MSDAPASPSHESGGEQSPRGSLSGAAREQDRYLPIANISRIMKKALPPNGKIAKDAKDTMQECVSEFISFITSEASEKCQKEKRKTINGDDLLWAMATLGFEDYIEPLKVYLARYREAEGDTKGSARSGDGSARPDQVGLAGQNAQLVHQGSLNYIGLQVQPQHLVMPSMQGHE

SEQ ID NO: 11896 - protein, 244 aa, Zea mays
  misc_feature (78)..(78): Xaa can be any naturally occurring amino acid
  misc_feature (104)..(104): Xaa can be any naturally occurring amino acid
  misc_feature (121)..(121): Xaa can be any naturally occurring amino acid
  misc_feature (143)..(144): Xaa can be any naturally occurring amino acid
RKHCPPSSVPSRRVACSSSAADADVVDLFDAAKLTVDKFVTSGMVVGLGSGPASALAIQYLGTRLRRGSLTGITAVTXPRSVLSASEADKAGIRANSYQEGTQXGEEGTLAAVIGRRRTRXGEPSFMAEKAMAKSAHKLAFIXXNDKYVTTGVEGSIPVLIKKVWRRPSFGTAGPLGGDHPLVTKEGHHVLDVIFTTPIQDLGQVAEKLDKVDGVVDHGIICSNQPYAVIASKGEVQVLDEKSS

SEQ ID NO: 11897 - protein, 137 aa, Gossypium barbadense
MAEEHRCQAPQLCANNCGFFGSPTTQNLCSECYRGLQLKEQQSSSAKQAFNHTLVPSSSSLPSSSSARSSFSASLPAKEEPSAGTKETKVVEEEEVQVTPNRCLSCKKRVGLTGFKCRCGMVFCGIHRYPGTTCLCF

SEQ ID NO: 11898 - protein, 113 aa, Zea mays
  misc_feature (101)..(101): Xaa can be any naturally occurring amino acid
GADQAVRQPFQSRFDLLLLLAGPNTTRLASKLARGPTVIMASSETAVAPFKGLKSAAGFPVSRRRTRSLGNLRNGGGIRSMQVWPAYGTKKFKTLSYLPPXLSTDNLLKQVDY

SEQ ID NO: 11899 - protein, 441 aa, Pseudomonas putida
MALTREQQIAALEKDWAENPRWKGVTRTYTAADVVRLRGSLQPEHTLARQGAEKLWKLVTQGAHPSFRPEKDFVNCMGALTGGQAVQQVKAGIQAIYLSGWQVAADNNSAESMYPDQSLYPVDSVPTVVKRINNSFRRADQIQWKAGKNPGDKGYIDYFAPIVADAEAGFGGVLNAYELMKNMIEAGAAGVHFEDQLASVKKCGHMGGKVLVPTQEAVQKLVAARLAADVSGVPTIILARTDANAADLLTSDCDPYDQPFVIGERTREGFYKVRAGLDQAISRGLAYAPYADLIWCETAKPDLDEARRFAEAIKKEYPDQILSYNCSPSFNWKKNLDDATIAKFQRELSAMGYKHQFITLAGIHNMWHGMFNLAHDYARNDMTAYVKLQEQEFADASKGYTFVAHQQEVGTGYFDDMTTVIQGGASSVTALTGSTEEEQFH

SEQ ID NO: 11900 - protein, 114 aa, Capsicum annuum
MEMVSKIACLVVLCMVVAAPHAEALTCGQVAGDLAACLPYLQGSGPLGSCCGGVRALLGAAKTPADRKTACTCLKSAANAIKGINLSKAAGLPTACGVNIPYKISPSTDCSTVQ

SEQ ID NO: 11901 - protein, 135 aa, Brassica napus
MGEVVEIMFGNGFPEIHKDTSPIQTLHSNQQECHWYEETIDDDLKWSFALNSVLHKGTSEYQDIALLDTKRFGKVLVIDGKMQSAERDEFIYHECLIHPALLCHPNPKTVFIMGGGEGSAARQILKHKTIEKVVM

SEQ ID NO: 11902 - protein, 151 aa, Picea abies
MAMDPLLSTVQQLLGVPDDLERILHAPTRSYMRDTEATASTPVDVKEYPNSYVFIVDMPGLKSNDIKVQVEDENVLNISGERKRNEKEEGEVKYIRMERRVAKFMRKFSLPADCNLEAISAACQDGVLTVTVPKLPPPEPKKPKTIAVKIG

SEQ ID NO: 11903 - protein, 436 aa, Triticum aestivum
  misc_feature (131)..(131): Xaa can be any naturally occurring amino acid
  misc_feature (313)..(313): Xaa can be any naturally occurring amino acid
  misc_feature (364)..(364): Xaa can be any naturally occurring amino acid
  misc_feature (395)..(395): Xaa can be any naturally occurring amino acid
RRSVPPLPYPSPPPAPASPPAPSPPPVPPRRGAAASAPLLHRGLDHPPAGRLPPPRRRLLRRPRRPPRRPPAPPRALALSPRLPPRTAWWTRVVRFVGYVPVAKRSRIVDLSRGFRQRGPDGSGVHSFVDXELAHHRLPKAKLTSDHHPLYNEGKTVVVTVNGEIYNHEELKAKLKSHQFQTGSDCEVIAHLYEECGGPLYMGWGLDGSVGLPAAREACCVAARRAIGICPLYMGWGLDGSVWFSSEMKALSDDCERFISFPPGHLYSSKTGGLRRWYNPPWFSESIPSAPYDPLLIRESFEKAVITRLMTDXLMTDVPFGVLLSGGLDSSLVASVVSRYLAETKVARQWGNKLHTFCIGLKGXPDLKAAKEVADYLCTVHHEIHFTVQEGIDAXLEEVLYHIQTYDVTTIRASPPIVSNVSGKINSWGVKNGLFR

SEQ ID NO: 11904 - protein, 396 aa, Pseudomonas syringae pv. syringae B728a
MTTQMLRKRICVLPGDGIGIEVMEAALPVIAALNLPFDLVPADIGWQCWRAEGETVPARTWEIMASCDATLLGAITSKPLAEAEAELPLTLQGQNRRYVSPVIQLRQNLDLYANVRPVTDMTGENRFRFVVIRENTEGLYAGLDFGCIPDALVPLLEEREALGAAWQREGQDDATVTLRLQTRSGLMRIFEYAFEYARKNHFTRVTFVDKPMVLRHSSAFARGIFEATAQRYPDVSGVIENVDAVALWMVQRPERFGVIVAENMFGDILSDLGAGVMGGLGFAPSGNFGNSGAYFEPVHGSAPAHAGLNKANPGAMFMAIALMLEHLGFPTESACISQAVSLVSRTSTRTYDLGGSHTTAQVGEAIVQQCIELQSRTFGYRNEQASAPGERHVSAL

SEQ ID NO: 11905 - protein, 138 aa, Magnaporthe grisea 70-15
MSDNEFGANDDLSLPKATVQKIVSEILPQSDGITYSKEARDLLIECCVEFITLISSEANEISDKEAKKTIACDHITKALEVLGFSEYVPAVLEAAAEHKEVQKGREKKANKFEQSGLSLEELERIQAEEFAKAASRHH

SEQ ID NO: 11906 - protein, 303 aa, Blumeria graminis
MKNLLAESLIEAICAKTKELLMQESNVVHIQAPVTVVGDIHGQFYDLIEIFKIGGFCPDTNYLFLGDYVDRGMFSVETISLLVCLKLRYPHRVHLIRGNHESRGVTQSYGFYTECSRKYGNANVWHFFTDMFDFLTLSVVINDQIFCVHGGLSPSIHSIDQIKVIDRYREIPHEGPMADLVWSDPDPERDEFSLSPRGAGYTFGAEVVKKFLAVNNMTHILRAHQLCQEGYQVLYDDRLSTVWSAPNYCYRCGNMASVLEVSDLGERFFNVFAAAPENDFLKGDLHNGTEKVSDGNSLPDYFL

SEQ ID NO: 11907 - protein, 349 aa, Bacillus sp. KSM-K16
MRAAVWYKEKDIRVEEREPAKLGARDVKVRVAWAGICGSDLHEYLHGPVIIPKGEPDPITGGESPLTLGHEFAGVIEEVGTEVKSFQKGDRVVINPLFTYGNKPASVDLYDGFSFAGLATDGGFADFAVLPEKNVYKLPDNLTLEEGALVEPMAVAVQAVKEADFKFGQSVAVFGAGPIGLFTIIAAKAAGASKIIVFDLSEERLEKARLVGATHTFNSGAVDPVEKVKSLVPDGVDVSFEVAGVNATFNQSIQVAKSRGVVVVVSIFAKPIEFNPMDLTGSGVKITSTLAYEPEVFQTTIDLMAEGALNPKGVITDRIELENIVESGFEVLTNDKRQAKILVKLSGEK

SEQ ID NO: 11908 - protein, 463 aa, Ralstonia metallidurans CH34
MPNLTTDHIDMLRHAVRGKVLLPADAGYETARTVWNATVDRRPAIIVQCSGTADVMQAVGFARDRGLVLAVRGGGHNIAGSAICNGGLVIDLSQLRTVHVDPLERVAWVSPGATLADFDHEAQAQGLATPLGINSTTGVAGLTLGGGFGWLTRKYGMTVDNLLGCEIVTADGTRHWTDSRHEPELFWALRGGGGNFGVVTLFQFRLHPVGPMITAGLLVFPAVEAKAVLRQYRAYVESTMPEDLNVWVVLRKAPPLPFLPASAHGKDVVVLAVFHDGDPAAAEKAIEPLRKFGETVGEHVGQMPYTAWQQAFDALLGPGARNYWKSHNFTRLEDGAIDAMTDFALRLPSPLADIFVGQVGGVANRVAPDATAYHHRDARYVLNVHARWERPDEDAACIAWARDFFRATETFATGGVYVNFLTDDETARIGAAYGPNYARLAQIKRTYDPQNLFSTNQNIAPAS

SEQ ID NO: 11909 - protein, 239 aa, Brassica napus
MGEESEAFATTAPLAPVTGERKVRNDLEETLPKPYLARALVAPDTEHPNGSEGHDSKGMSVMQQHVAFFDQNGDGIVYPWETYAGFRDLGFNPISSVFWAIFINFAFSYVTLPSWLPSPLLPVYIDNIHKAKHGSDSSTYDTEGRYVPVNLENIFSKYALTAPNKITLKELWNLTEGNRMAIDPFGWLANKVEWLLVYLLAKDEEGFVSKEAVRGVFDASFFEYCAKKNKEKADSRKQD

SEQ ID NO: 11910 - protein, 370 aa, Azotobacter vinelandii
MALSGTAAGNTALCTVGRTGNDLHYRGYDILDFATTCEFEEVAHLLVHGKLPNVAELNGYKAKLKSLRGLPAGVKAALEQLPPSSHPMDVMRTGVSVLGCLSPEKEDHNYPGARDIADKLMASLGSMLLYWYHFSHNGKRIDVETDDDSIGGHFLHLLHGKKPSDSWVRAMHTSLILYAEHEFNASTFTSRVISGTGSDMFSCITGAIGALRGPKHGGANEVAFEIQKRYDTPDEAEADIRARVERKEVVIGFGHPVYTVGDPRNKVIKEVARELSVEQGNTKMYDIAERLESVMWEIKKMFPNLDWFSAVSYHMMGIPTAMFTPVFVIARTSGWAAHAIEQRIDGKIIRPSANYVGPENLKFVPLRERK

SEQ ID NO: 11911 - protein, 230 aa, Lotus corniculatus
MTVAGYLNIGDFIPPLEWLDLQGVQGKMKKLHNRFDAFFAHIIEEQKVILKSEKHQDLLSTLLSLKEAPEDGDKLNDTEIKALLLNLFTAGTDTSSSTAEWAIAELIKNPRIMGQVQQELDNVVGKDKLVTELDMPNLPYLEAVVKETFRLHPSTPLSLPRAAAKSCEVFDYHIPKGATLLVNVWAISRDPKEWASPLEFRPERFLPGGEKASVDVRGTDFALIPFGAGR

SEQ ID NO: 11912 - protein, 353 aa, Aegilops triuncialis
MKTFLVFALLAIAATSAIAQMETSRVPGLEKPWQQQPLPPQQQPPCSQQQQPFPQQQQPIIILQQSPFSQQQQPVLPQQQPVIILQQPPFSQQQQPVLPQQPPFSQQQQQQQQQQQQQPPFSQQQQPVLPQQPPFSQQQQPPFSQQQQPSSQQPPFPQQHQQFPQQQIPVVQPSVLQQLNPCKVFLQQQCSHVAMSQRLARSQMWQQSSCHVMQQQCCQQLPQIPEQSRSEAIRAIVYSIILQEQQQGFVQPQQQQPQQSGQGVSQHQQQSQQQQQLGQCSFQQPQQLQQLGQQPQQQQIPQGIFLQPHQISQLEVMTSIALRTLPTMCGVNVPLYSSTTIMPFSIGTGVGGY

SEQ ID NO: 11913 - protein, 277 aa, Glycine max
  misc_feature (262)..(262): Xaa can be any naturally occurring amino acid
HVEELLPVVYTPTVGEACQKYGSIFMHPQGLYISLKEKGKIREVLRNWPEKNIQVIVVTDGERILGLGDLGCQGMGIPVGKLSLYTALGGVRPSACLPITIDVGTNNEKLLNDELYIGLKQRRATGQEYAELMHEFMTAVKQTYGEKVLIQFEDFANHNAFDLLEKYRSTHLVFNDDIQGTASVVLAGLVAALKLVGGNLADHRFLFLGAGEAGTGIAELIALETSKQTNAPLEEVRKNIWLVDSKGLIVSSRKDSLQHFKXPWAHEHEPVRNLVDA

SEQ ID NO: 11914 - protein, 162 aa, Triticum aestivum
  misc_feature (94)..(94): Xaa can be any naturally occurring amino acid
  misc_feature (132)..(133): Xaa can be any naturally occurring amino acid
  misc_feature (137)..(137): Xaa can be any naturally occurring amino acid
  misc_feature (154)..(154): Xaa can be any naturally occurring amino acid
MAPTVMASSATSVAPFQGLKSTAGLPVSRRSNGASLGSVSNGGRIRCMQVWPIEGIKKFETLSYLPPLSTEALLKQVDYLIRSKWVPCLEFNKXWVHPPVNNNASLGYYDGRYWDNVESLPNFGCTGPTQVXXLEGXQEGLPDAYFRIIGSTTXRQVQCVSS

SEQ ID NO: 11915 - protein, 483 aa, Ustilago maydis 521
MAPVAVTESTPIAPTAAKLNGAATHNGDMNGTITNTTGPSLFGSNTSAVLHGAKDLRIEERPYAAPIGDEVQIRVRATGLCGSDLHYYLHGRNGDFALQHSMCLGHESAGEIVAVGPNVPASLGLAVGDRVAIEAGRFCGSCLKCRDGRYNLCKQMRFASSAKTHPHLDGTLQKYMNWPSWLVHKLPANVSLTSAALCEPLSVVLQGIRRSQLQPGQSVLVYGAGAVGLLACAAAKASGASFVAAVDIDQGRLAFAAANGWADATYLLPRAAPAAVDGEQTNVGARRAAEDKAAISSASASAASLLKALSSSDPSSSQQTSYAIQPAPLDLSSEGFDVVFECTGVPTCVQTGIFATKAGGKVVLIGMGNPIQTLPVGSASLREVDIVGVFRYANTYPVALGLLAGGTLRAQGGGLHAQAVGLPTNLDTNEGHGPGRKMGGIENLVSHTFPLKHAIKAFETLANGKDPEHGRGVVKVFITDDDA

SEQ ID NO: 11916 - protein, 463 aa, Methanocaldococcus jannaschii
  misc_feature (457)..(457): Xaa can be any naturally occurring amino acid
MFIDGKWINREDMDVINPYSLEVIKKIPALSREEAKEAIDTAEKYKEVMKNLPITKRYNILMNIAKQIKEKKEELAKILAIDAGKPIKQARVEVERSIGTFKLAAFYVKEHRDEVIPSDDRLIFTRREPVGIVGAITPFNFPLNLSAHKIAPAIATGNVIVHHPSSKAPLVCIELAKIIENALKKYNVPLGVYNLLTGAGEVVGDEIVVNEKVNMISFTGSSKVGELITKKAGFKKIALELGGVNPNIVLKDADLNKAVNALIKGSFIYAGQVCISVGMILVDESIADKFIEMFVNKAKVLNVGNPLDEKTDVGPLISVEHAEWVEKVVEKAIDEGGKLLLGGKRDKALFYPTILEVDRDNILCKTETFAPVIPIIRTNEEEMIDIANSTEYGLHSAIFTNDINKSLKFAENLEFGGVVINDSSLFRQDNMPFGGVKKSGLGREGVKYAMEEMSNIXTIIISK

SEQ ID NO: 11917 - protein, 493 aa, Corynebacterium glutamicum
MTVTTPTTYSAIVADQLYIGGWREGTSERIATTTNPFNDETIATIRQASPDDVDAAYEIAKESQAVWAALAPKERVHILTKAADWIEENQEAVIELIRVESGSTAIKATIETSLAVGSLREAATFPTRITGQILPSNTPGKANYVFREALGVVGVISPWNFPFALSMRSVAPALACGNAVVVKPASDTPLTGGLLLGKIFEAAGLPEGVLNIVVGSGSEIGDHFVEHPIPRLISFTGSTPVGKQVGATATGGKHIKKVALELGGNAPLVVLEDADLDQAVGAAAMGKFLHQGQICMAVNRIIVQAPLYDEFVEAFAKRVQTLAYGDQCDDATVVGPVINDSQLHSVTKKIERARIEGAREVVSGPIEGRVIAPHVFADVTPAMELFREEIFGPVVGIIKAKDEAHALELANDTEFGLSSAVYTRDLARGLNFARQVEAGMTHVNDITVNDEAHVMFGGEKNSGLGRFNGEWAIEEFTTTHWVGVAPGQAQFPF

SEQ ID NO: 11918 - protein, 205 aa, Schizosaccharomyces pombe
MAMFSLEIPAISAETSKKLVVVGDGGCGKTCLLIVFSSGTFPERYVPTVFENYITDITYGPNSKVIELALWDTAGQEEYDRLRPLSYPNSNVILLCFSIDCPASLNNVTEKWYPEVQHFCPRTPIVLVGLKADLRKDRNATEVLRTQGLTPVTYQQAQSVALSMNAPYVECSAKENTGVNEVFQLAVGLTIKKSFSFSKKSCVIL

SEQ ID NO: 11919 - protein, 475 aa, Streptomyces coelicolor A3(2)
MSLHQGPRPSRDSDRDRRRLAVNPFHAAANPLGGMTEAPPAHRLPDSPLPPESAYRLVHDELMLDGNARLNLATFVTTWMEPQAGVLMSECRDKNMIDKDEYPRTAELERRCVAMLADLWHAPDPSTAVGCSTTGSSEACMLAGMALKRRWALRNADRYPAKDVRPNLVMGVNVQVCWDKFCNFWEVEARQVPMEGDRFHLDPQAAAELCDENTIGVVGILGSTFDGSYEPVADLCAALDALQERTGLDVPVHVDGASGAMVAPFLDEDLVWDFRLPRVASINTSGHKYGLVYPGVGWALWRDAEALPEELVFRVNYLGGDMPTFALNFSRPGAQVVAQYYNFLRLGREGYRAVQQSARDIAGSLAERVAALGDFRLLTRGDQLPVFAFTTADDVTAYDVFDVSRRLREGGWLVPAYTFPPHREDLSVLRVVCRNGFSADMADLLLADLERLLPELRRQPGPLTRDKGAATGFHH

SEQ ID NO: 11920 - protein, 81 aa, Glycine max
SNSYTRAVHQLSHRARGTAWLHPYTGLKSMAGLPTRKTNTDITSIASNGGRVQCMQVRPPAGSMKFETLSYLPDLDDAQLA

SEQ ID NO: 11921 - protein, 509 aa, Brassica juncea
MTSVNVKLLYHYVITNLFNLCFFPLTAIVAGKAYRFTIDDLHHLYYSYLQHNLITIASLFAFTVSGFGLYIATLPKPLYLVEYSCYLPPRHLKVSVSKIMDIFYQIKADTSSRNVACDDPSSLDFLRKIQERSGLGDETYSPEGLIHVPPRKSFAGSREETEKVIIGGIENLFENTKVKPKDIGILVVNSSKFNPTPSLSAMVVNTFKLRSNIKSFNLGGMGCSAGVIAIAIDLAKDLLHVHKNTYALVVSTEGITQGIYAEENRSMMFSNCLFRVGGAAILLSNKSGDRRRSKYELVHTVRTHTGADDKSFRCVQQGDDEDGKTGVCLSKDITNVAGTTLTKHIAICRPLILPLSEKFLFFATSVAMKLLKDKIKHYYVPDFKLAVDHFCIQPGGRAVIDELEKNLGLSPIDVEASRSTLHRFGNTSSSSIWYELAYIEPKERLKKGNKKGWQIALGLGFKGNSAVWVALNNVKASANSPWEHCIDRYPVKNDSDLSKSKTQVQNGRS

SEQ ID NO: 11922 - protein, 173 aa, Zea mays
  misc_feature (158)..(158): Xaa can be any naturally occurring amino acid
  misc_feature (170)..(170): Xaa can be any naturally occurring amino acid
MCDNKGNSEGHSTLLLGKYELGRVLGHGTFAKVYHARNLQTGKNVAMKVVGKEKVIKVGMMEQIKREIAVMKMVKHPNIVELHEVMATKSKIYIAMELVRGGELFNKVAKGRLKEDIARVYFQQLISAIDFFHSRGVYHRDLRPENLLLDEHGNLKVXDFGLSTFSEHLXQDG

SEQ ID NO: 11923 - protein, 324 aa, Glycine max
MATLVLYQFFLKLLLLISVFQLSFAARRLNQLVQDQSQLLHYHNGPLLYGKIAVNLIWYGHFKPSQKAIITDFVTSLSSPSSQSSQPSVATWWKTTEKYYHLSPKNKKAASSLSLSLGDQFLDEGFSLGKSLTSKNLVELASKGGQRNAINVVLTSADVAVEGFCMSRCGTHGSSSSASHVKKNNNGKNYKFAYIWVGNSETQCPGQCAWPFHQPIYGPQSPPLVAPNNDVGLDGMVINLASLLAGTATNPFGNGYFQGPAEAPLEAASACPGVYGKGAYPGYAGNLLVDSATGASYNVEGDNGRKYLVPALYDPSTSSCSTPV

SEQ ID NO: 11924 - protein, 62 aa, Triticum aestivum
  misc_feature (28)..(28): Xaa can be any naturally occurring amino acid
GGSFGVGDTCEHHFESKADSCAFKTYPXQAGAIRKGGHIAIKALPCKGGEVSTCKTGKHGHA

SEQ ID NO: 11925 - protein, 342 aa, Triticum aestivum
  misc_feature (151)..(151): Xaa can be any naturally occurring amino acid
  misc_feature (183)..(183): Xaa can be any naturally occurring amino acid
AASLPGAPALIEKPPTRPESAARAPPRLPPRAPQSAGGAPPRSPPRHTPEPGSRAAVRRRAEAGVRARAMDVDSVECLSLPDAAMDADDVGLALHPHGGILAAASRPAAYPKAGAGAGGIVAPGSSVHELLECPVCTNSMYPPIHQCQNGXYIKVKHAALCSFRPYSCPYAGSECSVTGDIPXYLVNHLRDDHKVDMHSGCTFNHRYVKSNPREVENATWMLTVFHCFGQYFCLHFEAFQLGMAPVYMAFLRFMGDENEARNYSYSLEVGANGRKMVWEGTPRSVRDSHRKVRDSHDGLLIQRNMALFFSGGDRKELKLRITGRQEKETQTPPQAACVTATG

SEQ ID NO: 11926 - protein, 371 aa, Agrobacterium tumefaciens str. C58
MECCRFSRTAAILDANRNWREETRMRGVVIHAAKDLRVEDVAGQPLAADEVRVAVAVGGICGSDLHYYNHGGFGTVRVREPMALGHEFAGTVVEVGSSVSHLVPGMRVAVNPSLPCGTCRYCAQGRQNQCLDMRFMGSAMRSPHVQGGFREVVTVHSTQPVQIADGLSMGEAAMAEPLAVCLHAARQAGSLLGKTVLITGAGPIGMLSLLVARLAGAAHIVVTDVADAPLDLARRIGADEAVNILRDADMLEKYRFEKGVFDVLFEASGNQAALLPALDLLRPGGIIVQLGLGGDFTIPMNLIVAKELQLRGTFRFHEEFAQAVNMMGRGLIDVKPLISATLPFDQAREAFDLAGDRAKSMKVQLAFSGAA

SEQ ID NO: 11927 - protein, 145 aa, Thermoanaerobacter tengcongensis MB4
MSLMRRGRDWWDWPFDINIRNLPSIFDINFPSLSGLFSRPRVDIVESETEIVATAELPGVDKKDIEINVYDNILEIKGQTSVDEEKEDKNYYIRERYYGSFARRIELPAEVDPERTTAKFENGILKITMPKLHPSKPKKRRIDIE

SEQ ID NO: 11928 - protein, 214 aa, Ustilago maydis
MAPAAICRKLVIVGDGACGKTSLLCVFAIGEFPQEYEPTIFENYVAEIRLDGKPVQLALWDTAGQEEYERLRPLSYSQAHVILIAFAIDTPDSLENVQVKWMEEVRQICGPSVPVLLVGCKKDLRENAIAKGKPVQGHYVKRQQAKLVAAQIGARSYHECSSLNNQGVDAVFEAATRAAMLVRNSGASSGGAISQSKTKEALHNDAGSCKCIVL

SEQ ID NO: 11929 - protein, 201 aa, Anaplasma phagocytophilum
RSEITFIDGNKGTLRYRGIDIENLIGAPNSFSSIVYLLLKGTLPSATEHEEFARILGAEYDVPEQVMNVIRSFPRDSHPMAILIASFSALAANYHASRIDPLTGAIIAIAKVPGIVASIYRHVANLDFIQADANLEYTHHFIRMMFGNMDEAHRDIMHKALDAIFIMHADHEQNASTATVRMSGSSGAGLFACLCAGVATL

SEQ ID NO: 11930 - protein, 503 aa, Pectobacterium carotovorum
MSNSFCVVYKGSDTDINNIQRDFDGKGEALSNGYLFIEQNGHYQKCEMERGTAYLIGSLYNRTFLIGLAGVWEGEAYLANDAELLALLFTRLGANALALAEGDFCFFIDEPNGELTVITESRGFSPVHVVQGKKAWMTNSLKLVTAAEGEGALWFEEEALVCQSLMRADTYTPVKNAQRLKPGAVHVLTHDSEGYSFVESRTLTTPASNQLLALPREPLLALIDRYLNAPLEDLAPRFDTVGIPLSGGLDSSLVTALASRHFKKLNTYSIGTELSNEFEFSQQVADALGTHHQMKILSETEVINGIIESIYYNEIFDGLSAEIQSGLFNVYRQAQGQVSCMLTGYGSDLLFGGILKPGAQYDNPNQLLAEQVYRTRWTGEFATHGASCYGIDIRHPFWSHSLISLCHALHPDYKIFDNEVKNILREYADSLQLLPKDIVWRKKIGIHEGSSVNQAFANVLGSTVDNYQTKSRFTYRVYQAFLRGRLSITDVTPSQLKDLIKKD

SEQ ID NO: 11931 - protein, 193 aa, Ustilago maydis
MQTIKCVVVGDGAVGKTCLLISYTTNAFPGEYIPTVFDNYSANVMVDGKPVSLGLWDTAGQEDYDRLRPLSYPQTDVFLVCFSLVSPPSFENVRTKWWPEVSHHAPNIPTILVGTKLDLREDPETIAKLRDRRMQPITYAQGNQMARDIHATKYLECSALTQKGLKGVFDEAIRSVLAPAPVQSKKKNNCLIL

SEQ ID NO: 11932 - protein, 160 aa, Triticum aestivum
MAGMVFGLDDPMMTALQHLLDIPDGEAGGTAGGEKQGPTRAYVRDARAMAATPADVKELPGAYAFVVDMPGLGSGDIQVQVEDERVLVISGERRREEKEDAKYLRMERRMGKLMRKFVLPENADMEKISAACRDGVLTVTVEKLPPPEPKKPKTIQVQVA

SEQ ID NO: 11933 - protein, 301 aa, Picrophilus torridus DSM 9790
MIDPEIKEIIENAGPLNPADIKIDEFRALMDNLAIEMSREKIKVREVTDIKINNIKSRLYNDSDSDGIIIYMHGGGFVFGSIESYDNICRYIAKCSGLKVLSVDYRLAPENKFPAALDDSFEAFKYVYDHYSDLRIKMDRICLAGDSAGGNLAASLSLKIYDELGVKPGLDVLFYPSLAPDTFSRSFSEYNDGPVLTGDLIQWFGSQYYKNFYDVLNPYFSPMLGDLSKMPESIVVTAEYDPLRDQGESYLKMLRKANVRATGIRSLMMVHGFATDFEYVSAARNILFMVYSLAGNIINKL

SEQ ID NO: 11934 - protein, 201 aa, Anaplasma sp. KhabIx
RSEITFIDGNKGILRYRGIDIENLIGAPNGFSSIIYLLLKGTLPSETEHEEFARILGTEYDVPEQVMNVIRSFPKDSHPMALLIACFSVLAAQYHASHIDSLTSALIAVAKVPGIVASIYRHATNLEFIQADANLEYTHNFIKMMFGDTNEEHRDIIHKALDAIFIMHADHEQNASTSTVRMSGSSGAGLFACLCAGVATL

SEQ ID NO: 11935 - protein, 478 aa, Gossypium hirsutum
MDSTSKSNAATSSKKDANNGQTLLLGRYEVGKLLGHGTFAKVYHARNVKSGDNVAIKVIDKEKILKSGLIAHIKREISILRRVRHPNIVQLFEVMATKSKIYFVMEYVRGGELFNKVAKGRLKEDVARKYFQQLISAVHFCHARGVYHRDLKPENLLLDENGDLKVSDFGLSAVSDQIRQDGLFHTFCGTPAFVAPEVLARKGYDAAKVDIWSCGVILFVLMAGYLPFQDQNIMAMYKKIYKGEFRCPRWFSPELIRLLTKLLDTNPETRITIPEIMEKRWFKKGFKHIKFYIEDDKLCSVEDDDNDVGSCSDQSSMSESETELETRKRVGTLPRPASLNAFDLISFSPGFNLSGLFEEGEEGSRFVSGAPVSTIISKLEEIAKVVSFTVRKKDCRVSLEGSREGAKGPLSIAAEIFELTPSLVVVEVKKKGGERGEYEDFCNRELKPGLKELMVEESQSSAAASLATSSSYLPSDTE

SEQ ID NO: 11936 - protein, 323 aa, Heterocapsa triquetra
MAPAKTSSAAMLGLGAAGWLSSGSLFVSPTPPRAAELSRYAPQATAAPAAGASQGFAPGVRCSILGVAAVTVAAGARRVARRATQDELKKQVGYKAVDDYVKSGTVIGLGTGSTAAFAVERVGQLLKSGELKDIIAIPTSIRTKEQAESLGIPLATLDTHSDLDVAIDGADEVDPNLNLVKGGGGALFREKIVEMCAKKFIVIVDESKMCGGLGPGFPIPVEIVPFCHEHTMREIAKLPALAGCKPVLRLGDVANNKPDGDKPAVTDNSNYIVDLVFETPIKDAVAAGEQLKNTVGVVDHGLFTGMTTACIIAGSDGISVKEA

SEQ ID NO: 11937 - protein, 233 aa, Triticum aestivum
WLGNRRRIIVMNREDMVSADDRNAWATYFSSQGIKVIYSNGQLGMGTMKLGRMAKSAASTVNTRRREKGLLPRPVRAGIVGYPNVGKSSLINRLLKRRMCPAAPRPGVTRELKWVRFGKDLELLDSPGILPMRISDQAAALKLAICDDIGERSYDFADVAAILVQILLRHPAVGSEAFRKRYKIDVDSDCGKLFVTKLSVHLFNGDTTQAAFRILSDFRKGRFGWVALERPPT

SEQ ID NO: 11938 - protein, 255 aa, Glycine max
  misc_feature (198)..(198): Xaa can be any naturally occurring amino acid
  misc_feature (231)..(231): Xaa can be any naturally occurring amino acid
  misc_feature (243)..(243): Xaa can be any naturally occurring amino acid
MRAMEDHFTLLSLDDGSLYVDVSGGALWEDVLKRCVSEFRLAPRSWTDYLGLTVGGTLSNAGVSGQAFRYGPQTANVTELEVVSGKGETLVCSESQNSELFFATLGGLGQFGIITRARVPVQQAPDMVRWIRVVYTEFGDFTRDAEWLVTLREGDGFDYVEGFVFVNSDDPCNGWTTVPVGPNQYFDPVRIPSTAGPXLYCLELALHYRNQDHPSAVDMEVDRLLGRLRFXEGLKFSVDVTYXEFLLRVKRVEGD

SEQ ID NO: 11939 - protein, 490 aa, Burkholderia cepacia R1808
MPLTLSRTELVRTANLVDGSWRAALDGRCFDVTNPATLDTIAYAPDSGAADARAATDAAARALPAWRATPARERAAILRAWHAAIVAHTDDLAKLMSLEQGKPLAEARGEVAYGASYVLWFAEEATRTYGDLIPQQQRGKQLSAVKVPIGVVAAITPWNFPLAMIARKIAPALAAGCTVVAKPAEDTPLTALALGFLAMEAGVPPGVLNLIAASRERGIDAVADWLADARVRKITFTGSTAVGKLLARESAATLKKLSLELGGNAPFIVFDDAQLDAAVDGLMAAKFRNGGQTCVSPNRVYVQAGVYDAFAAKLAARVAALKVAPATDPAAQIGPMINARAVDKIARHVGDALERGARVLTGGRRLSQLGPNYYAPTVLADATADMQLSCEETFGPVAALFRFDTEEQAVDAANDTPFGLAAYFYTQDVRRIARVSARLETGIVGINEGALASEAAPFGGVKESGYGREGSKYGLDDYLSIKYLCQGGLD

SEQ ID NO: 11940 - protein, 352 aa, Rhodococcus sp. TK6
MRVFAVQPDDTAIHDLEVPTPSPEGRQVLLKVVRAGVCHTDTHLRAGGYDLGSRGMMSMKARGIEYPMVLGHEVVGVVEKVGDSVESVRVGDVRLIYPWIGCGECRQCREGHDNRCAAGKNLGVARHGGYAEYILVPDEKYLVDIDGLDPSWAATLACSGLTAYSAVDKVLPLEPDEPVVVFGAGGLGLTAIAILRSRGHRNICAVDVAERNLALAQDMGASSTVLSGPGSGADDIRRAAGGPASAVIDFVNNGVTATAAFEVLAKAGIMVQVGLFGGEVTLPTALLALRMIRIEGSFVGTPAQMQELVRLAQRGALPHIPLVERPLSAAAVSQALDDLTAGGVAGRIVLTA

SEQ ID NO: 11941 - protein, 362 aa, Bacillus sp. KSM-K16
MNDSIPKKMKAVVAYGPKDYRLEEVDVPVIEHDKEIIVKVEATGICAGDIKAFDGAPSFWGDDTQPAYIKAPMIPGHEFIGHVVAKGDGVGDFEIGDRIISEQIVPCWECRFCNRGQYWMCEKHDLYGFQNNVNGSMAEYMKFTKEAINYKVPADLPIEQAILIEPYACSMHAVQRARIELGDIVVLSGAGTLGLGMIGAVKKSGAKTLVVLDLKDERLALAQQFGADVVLNPAKDNVVEKVKDMTDGYGCDVYIEATGHPASVEQGLSMIRKLGRFVEFSVFKDPVTVDWSIISDRKELDVLGSHLGPYCYPLVIEGIANGDLPTEGVVTHELPLERFAEGFELMKNGSNSLKIILKPQQA

SEQ ID NO: 11942 - protein, 121 aa, Glycine max
EKQLVSVTKDTRKGGPLEGAHVHIVHLSDSSASLDLIKEAKSHGDSISVETCPHYLAFTSEEIPNGDTRFKCSPPIRDAYNKDKLWEAVLVRFLSKNTNYSLSFMIIYDLICFLHVLLFIS

SEQ ID NO: 11943 - protein, 460 aa, Rhodococcus sp. TK6
MGVYTTTDPATGEEVAQYPEISDAELDELIGRSAAAYRSWRTTPLEQRRAVLARAAEIHREQADELAALLTLEMGKPITQAKGEVALVASIYQYYADHAEEFMADEPLDIAGSGTAVVRTEAIGPLVGVMPRNYPFYQVARFAAPNIALGNTIILKHARNCPQSALALERVLTEAGLPDGVYLNAFISSAQVAAAIADPRIQGVSLTGSEKAGSAVGEVAGRHMKKCVLELGGSDPFIVLGDADVDAAASAAVVGRLGNGGQACTASKRFLVEEPVYDEFVRKFLDGMTGWQPSDPASPETKLGPLSSRSAVDELDELVQDAVSHGAEVLTGGDRPDEKGAYYPPTVLVGVTPEMRAYHEELFGPVVVVHRVGSLDEAIEAANDSPFGLSSSVFTSDPDKADRVAEELETGMVWINSTSKSSPDLPFGGVKRSGVGRELARFGFNEFANKKLVRNPGGKK

SEQ ID NO: 11944 - protein, 397 aa, Oryza sativa (japonica cultivar-group)
MLTCIACSKQLAGGAPPLREQSDDADDAAVARGAGECATPSTRQAIKALTAQIKDMALKASGAYRHCKPCAGSSSSSPAAGARRHHPYHAYADSGSDRFHYAYRRAGSGGDATPSVSARTDFLAGDEEEEEEEEEEEGTTADGSEDDEAKEWVAQVEPGVLITFLSLPEGGNDLKRIRFSREIFNKWQAQRWWAENYEKVMELYNVQRFNQQTPLPTTPKSEDESLKEDIPATPPLNSERLPHTLHRSLTGGRTTGYGQPDSLGHQHNLGNGHRQQHHHCYTGHQCYGSVGLASTPKLSSISGAKTETSSMDASMRSSSSPEEVDRSRELSVSVSNASDQEREWVEEDEPGVYITIRALPGGIRELRRVRFSREKFSEMHARLWWEENRARIHDQYL

SEQ ID NO: 11945 - protein, 180 aa, Chloroflexus aurantiacus
MAKQRLRVIPLGGAGEVGRNMWVVEYGDDIVILDCGVMFPDADMLGVDLVLPDITYLREKTDHIRGILLTHGHEDHIGAVPHLIADLGFPPIYGTKLTLGLLGNRLREHRLHDKVTTVQSMNGCRSRWSVHVEASNCQSFPMRRLAYHLRLRLRARGAITRCGATSGSCDGIHPGRTMSC

SEQ ID NO: 11946 - protein, 299 aa, Glycine max
  misc_feature (162)..(162): Xaa can be any naturally occurring amino acid
MVYVKSQKSKAYFKRYQVKFKRRREGKTDYRARIRLINQDKNKYNTPKYRFVVRFSNKDIVAQIISASIAGDIVLAAAYAHELPRYGLEVGLTNYAAAYCTGLLLARRVLKTLEMDEEYEGNVEATGEDYSVEPAESRRPFRALLDVGLIRTTTGNRVFGAXLKGALDGGLDIPHSDKRFAGFDKEKKELDAEVHRKYVFGGHVAAYMKILAEDEPEKYQSHFSEYIKRGIEADGIEALYKKVHAAIRADPSLKKSEKQPPKEHKRYNLKKLTYEERKAKLIARVAAINSAADNDEDDE

SEQ ID NO: 11947 - protein, 451 aa, Triticum aestivum
  misc_feature (29)..(29): Xaa can be any naturally occurring amino acid
  misc_feature (169)..(169): Xaa can be any naturally occurring amino acid
MAASEGAMRMGKYEMGRTLGEGHFGMGRXSGRGTSGRAFVAKIPDPERVLAMKIDEQIKTEIATLKLLKHPNVVRLYEVAASKTKIYMVLEYVNGGELFEKIALKGKLSEKEGRKLFQQLMDAVSYCHERGVYHRDLKPENVLVDAKGNIKVSDFGLSALPQHQRRTRXLHTTCGSPNYIAPEVLLNKGYDGSMSDVWSCGVILYVMLTGNLPFDDENMVVLYQKILKGDYRIPKWLSPGAQDILRKLLDPNPITRLGMDGLREHDWFNQSYTPAVPFDDDDDNYVGDDNSHMTKHNGIPDNPAINQMNAFQLIGMSSCLDLSGFFEKEDVSERKTRFASNYPPTYLFEKIESNVINMGFQVQKNNGKLKVIQERKGPTNPRGHGSLLISAEVFEINESLYVVELKRSCGDCSLYRQLCATLSDDLGICKSQQLLKNDSIRQELYRFNSSF

SEQ ID NO: 11948 - protein, 493 aa, Agrobacterium tumefaciens str. C58
MRSKVMRRFQCYIDGRFEDGEASFSSLDPATGQPWAEMPESREADIGRVVEAAHRALYEDTVWSKLTATQRGKLLYRLADLVAENAKTLAELETRDTGKIIRETSAQIAYVADYYRYYAGLADKIEGAYLPIDKPDMDVWLRREPVGVVAAIVPWNSQLFLAAVKIGPALAAGCTIVVKASEDGPAPLLEFARLVHEAGFPAGVVNVVTGFGASCGNALTTHPKVAHIAFTGGPETARHIVRNSAENLASTSLELGGKSPILVFADADLESAANAQVAGIFAATGQSCVAGSRLIIEKSVKDRFLQILAAKAEAIRIGSPLDMATEVGPLATERQRKHIVSLVSASVDAGAKVVTGGEPVEGEGYFYRPTILDCDGIRSPSLEKEFFGPVLSVVSFETEAEAISLANDTVYGLASGVFTQNLTRAHRLMKAIRAGIVWVNTYRAVSPIAPFGGFGLSGDGREGGLAAALDYTRTKTIWLRTSDDPIPDPFVMR

SEQ ID NO: 11949 - protein, 490 aa, Triticum aestivum
MDPNSFKTGGLLLPTIERRCASPPSVIVIGGGISGIAAARVLSNSSFEVTVLESRDRIGGRVHTDYSFGCPIDMGASWLHGVSNENSLAPLISHLGLRLYHTSGDNSVLYDHDLESCSLFDKNGLAVPMETAAKVGVIFEKILKETVKLRDEQEHDMPLEQAISMVLERHPDLKLEGLDDRILQWCVCRLEAWFAADADEISLKNWDQEHVLTGGHGLMVDGYFPVIQALAQGLDIRLNQRVKKIARQQKGVTVTIEDGTQYSADACIITVPLGVLKANIIKFEPELPSWKSSAIADLGVGIENKVAMHFDKAFWPNVQVLGMVGPTPKTCGYFLNLHKATGHPVLVFMAAGRFAQDVEKLSDKEAVELVMCHLRKMIPDATEPSQYLVSRWGSDPNSLGSYSCDLVGKPSDVCERFSAPVESVLYFAGEAASAEHSGAVHGAYSSGMDAAEECRRRLLMRKGVPDLVQVGAAACEEMADVVAPLQICRT

SEQ ID NO: 11950 - protein, 186 aa, Brassica napus
  misc_feature (42)..(42): Xaa can be any naturally occurring amino acid
LDPRVRTGAKLSRSEHSMGASSEPKSIYDFTVKDAKGNDVDXSTYKGKVLLIVNVASQCGLTSTHASELAQLYQKYKDHGFEILAFPCNQFGNQEPGSNEEIVQFACTRFKAEYPIFDKVDVNGDSAAPIYKFLKSSKGGLFGDGIKWNFAKFLVDKDGNVVDRYAPTTSPLSIEKDLKKLLGVTA

SEQ ID NO: 11951 - protein, 388 aa, Photorhabdus luminescens subsp. laumondii TTO1
MSEQNTMTELTTFKPKKSVALSGVSAGNTALCTVGKTGNDLHYRGYDILDLATQCEFEEVAYLLVHEKLPSRAELAAYKAKLTALRGLPGSVKAALETLPAAAHPMDVMRTGVSVLGCTLPEKDDHNLAGARDIADRLLASLSSILLYWYHYSHNGRRIEVETDDVSIGGHFLHLLHGKKTCESWEKAMHTSLILYAEHEFNASTFTSRVIAGTGTDIYSAIIGAIGALRGPKHGGANEVSFEIQQRYENPDEAERDILARLARKEVIIGFGHPVYTISDPRHKVIKDVALQLSKEAGTTKMFNIADRLEAVMWANKKMFPNLDWFSAVSYHMMGVPTAMFTPLFVIARTAGWAAHIIEQRIDNKIIRPSADYTGPENRVFTPIGKRG

SEQ ID NO: 11952 - protein, 342 aa, Burkholderia cepacia R1808
MKALAKLERAPGLTLTRVKRPEVGHNDVLIKIRRTAICGTDIHIWKWDDWAQKTIPVPMHVGHEYVGEIVEMGQEVRGFAIGDRVSGEGHITCGFCRNCRAGRRHLCRNTVGVGVNREGAFAEYLAIPAFNAFKIPPEISDDLASIFDPFGNATHTALSFNLVGEDVLITGAGPIGIMAVAIAKHVGARNVVITDINDYRLELARKMGATRAVNVARESLRDVMAELRMTEGFDVGLEMSGVPSAFTSLLEAMNHGGKVALLGIPPAQTAIDWNQVIFKGLEIKGIYGREMFETWYKMVAMLQSGLDLSPIVTHRFAVDDYEKGFAAMLSGESGKVILDWTA

SEQ ID NO: 11953 - protein, 201 aa, Glycine max
  misc_feature (19)..(19): Xaa can be any naturally occurring amino acid
  misc_feature (30)..(31): Xaa can be any naturally occurring amino acid
  misc_feature (112)..(112): Xaa can be any naturally occurring amino acid
  misc_feature (120)..(120): Xaa can be any naturally occurring amino acid
  misc_feature (160)..(160): Xaa can be any naturally occurring amino acid
GPRIGRFDRSGRSVALRGXHSASLVVLGTXXLWFGWYGFNPGSFLTIAKGYESGGYYGQWSAIGRTAVTTTLAGSTAALTTLFSKRLLAGHWNVIDVCNGLLGGFVACHSDXTLVEQWTXVCEWVSDGVAFVLGLISQPRRYSTMICWSAAQFHGGCGAXGIYVTGLFAKKEYVEEIYGGGRPFGALMGGGGRLLAAQVIQ

SEQ ID NO: 11954 - protein, 484 aa, Agrobacterium tumefaciens str. C58
MHLNDPTLFCEKVPVAGRWIGCDDRETATIRNPATGKIVGQVPELGATETQAAITAAVIAQKAWARRTAGERAAILKAWHRLVMENRDDLGMILTLEQGKPLAEAKGEIAYGASFIEWFAEEARRINGETVPGHQADKRILVLRQPVGVVAAITPWNFPNAMITRKVGPALAAGCAVVLKPAPQTPFSAIALAILAERAGLPLELFSIVTGPAAEIGGVLTASPDIRLLTFTGSTRTGEHLYRQCAPTIKKLGLELGGNAPFIVFNDADLDAAVEGALIAKFRNNGQTCVCANRLYVQSGVYDAFAEKFARAVSGLKVGNGLEEGSILGPLIDGNAVAKVEAHIADALSKGAQIAAGGSRYALGGNFFEPTILRNVTADMQVAREETFGPLAPLFRFEDEEDVIAQANNTDFGLASYFYARDLSRVFRVAEALEYGMVGVNTGAISTAEAPFGGVKMSGLGREGSRHGIEEYTELKYVCIGNIL

SEQ ID NO: 11955 - protein, 517 aa, Glycine max
MAEVAPPKKENPNLLLGRFELGKLLGHGTFAKVHHARNIKTGEGVAIKIINKEKILKGGLVSHIKREISILRRVRHPNIVQLFEVMATKTKIYFVMEYVRGGELFNKVAKGRLKEEVARNYFQQLVSAVEFCHARGVFHRDLKPENLLLDEDGNLKVSDFGLSAVSDQIRQDGLFHTFCGTPAYVAPEVLSRKGYDGAKVDIWSCGVVLFVLMAGYLPFNDRNVMAMYKKIYKGEFRCPRWFSSELTRLLSRLLDTNPQTRISIPEVMENRWFKKGFKQIKFYVEDDRVCSFDEKLLLHHDDDLATSDSEVEIRRKNSNGSLPRPASLNAFDIISFSQGFDLSGLFEEKGDEARFVSSAPVSKIISKLEEVAQLVSFSVRKKDCRVSLEGCREGVKGPLTIAAEVFELTPSLVVVEVKKKGGDKAEYEKFCNSELRPALENLGMEESASSSSSCHQSTHTQSEFQQHRTLSDSALNRHSDNECLFERELGLADETSISQHGESKFECQQENMAMFTI

SEQ ID NO: 11956 - protein, 160 aa, Glycine max
  misc_feature (99)..(99): Xaa can be any naturally occurring amino acid
  misc_feature (152)..(152): Xaa can be any naturally occurring amino acid
ASSMISSPAVTTVNRAGAGMVAPFSGLKSIAGFPTKKTNNDITSIATIRGKVQFLHVWPPLGKKKIDTLSYLPYLDDAQLPNELEYLLTNVWIPCLEFXMEHIFMYREHYTSPGYYNSRYCTMLKLPMVGCTDASRVIKELLQAKTAYPNGXFIRIIGFD

SEQ ID NO: 11957 - protein, 283 aa, Picrophilus torridus DSM 9790
MEFYLGKTGERISSIGIGTWQMKSNDQSIMAIRAGLDAGSNFVDTAEAYRNEAMVGRAIESREVFIATKVFPNHFKYDSLIRACENSLKRLNVKTIDLYQLHWPNRHVDIKETMKAMEHLVDTGMIRYIGVSNFNVNELKSAMSAMSKYEIVSNQVEYNPLVRYIEPEISEFCRKNSISIIAYSPLMHGHDIDPISKDESPFNIIANKRNATVRQVILAWILSKNFFAIPKSNVPEHVIENVKSMNINLSSEETSMIDHYVSRFNKKSLKERYGNIISFVSRF

SEQ ID NO: 11958 - protein, 449 aa, Xylella fastidiosa 9a5c
MNPTLIVNARLVNEGREFDSDLRIENGRIARIDTGLSAQSKDIVIDAAGRRLLPGMIDDQVHFREPGLTHKGDIASESAAAVAGGLTSFMDMPNTNPPTLDVAALQAKYDAASGRAWGNYGFYLGASNDNLAAIQALDPKTSPGIKVFMGASTGNMLVDNEATLEGIFRDAPTPIITHCEDTPTINATLAKYQSRYGDTLSAEQHPDIRSRQACLKSSQLAVSLAKKNGTRLHVLHISTADELRLFEAGPLVDAAGKRRKQITAETCIHFLHFDRMDYARLGNLIKCNPAIKEVSDREALIAALAKDVIDVLATDHAPHTWEEKQQPYAQAPSGLPLVQYALVAALELVHAGRLSVTEIVRKFAHAPAQLFDVTGRGFLREGYWADLVLVEDTPFTVKRQEILSKCGWSPFEGTTFRSRIASTWVNGHHVWDGNRLVGVPNGQRLEFDR

SEQ ID NO: 11959 - protein, 147 aa, Triticum aestivum
  misc_feature (140)..(140): Xaa can be any naturally occurring amino acid
MSDEEHHFESSDAGASKTYPQQAGNIRKGGHIVIKGRPCKVVEVSTSKTGKHGHAKCHFVAIDIFTAKKLEDIVPSSHNCDVPHVNRVDYQLIDISEDGFVSLLTDSGGTKDDLKLPTDDNLSALMKSGFEEGKDVVVSXVMSSMGE

SEQ ID NO: 11960 - protein, 359 aa, Capsicum annuum
MDSTNQNLTQTEDEAFLFAMQLASASVLPMVLKSALELDLLEIMAKAGPGAAISPSELAAQLPTKNPEAPVMLDRMLRLLATYSVLNCTLRTLPDGRVERLYSLAPVCKLLTKNADGVSVAPLLLMNQDKVLMESWYHLTDAVLDGGVPFNKAYGMTAFEYHGTDPRFNKVFNRGMSDHSTMTMKKILEDYKGFEGLNSIVDVGGGTGATVNMIVSKYPSIKGINFDLSHVIEDAPAYPGVEHVGRDMFVSVPKADAIFMKWICHDWSDEHCLKFLKNCYEALPANGKVLVAECILPETPDTSAATKNAVHVDIVMLAHNPGGKERTEKEFEALAKGAGFTGFRRACCAYQTWVMEFHK

SEQ ID NO: 11961 - protein, 336 aa, Rubrobacter xylanophilus DSM 9941
MARTVTLIPGDGIGPEVTGSAKEVIGALGVDIEWEIAEAGETVMEREGTPLPEYVLESIRRNKVALKGPLTTPVGTGFRSVNVALRKELDLYANIRPALSLPGLDLPYRDIDILLFRENTEDLYAGVEHMVGKHAAESIKIITREGTERICRMAFEYSRDQGRRHVTVVHKANIMKYTDGLFREVFYEVARDYEDDFEEIDERIVDNMAMQLVMKPNLYDVLVCPNLYGDILSDLCAGLTGGLGVAPGANIGEDIALFEPVHGSAPKYAGQNRANPLATLLSAKNMLYYLGYGEAADRMQGAINAALKNPETRTKDLGGSAGTREFTRAVISNLTG

SEQ ID NO: 11962 - protein, 179 aa, Zea mays
  misc_feature (43)..(43): Xaa can be any naturally occurring amino acid
  misc_feature (80)..(80): Xaa can be any naturally occurring amino acid
MATSFQGTTTTCTACDKTVYLVDKLTADNRIYHKACFRCHHCXGTLKLANYNSFEGVLYCRPHFDQLFKRTGSLDKSFEXATKVSSAFAGTREKCVGCSKTVYPTERVTVNNTMYHKSCFKCCHGGCTISPSNYIAHEGKLYCKHHHIQLIKEKGNFSQLENDHEKTSQAGSLEEDEQE

SEQ ID NO: 11963 - protein, 466 aa, Burkholderia cepacia R1808
MNQAALIEADRQHLIHPVVNYRAHEARGVTVLESADGVFLRDGDGHTLLDAFSGLWCVNVGYGRESIVKAAAEQMAKLPYATGYFHFGSQPAIELAERLAALAPPSLNRVYFTLGGSDAVDSAVRFITHYFNATGRPSKKQMIALERGYHGSSSIGAGLTALPAFHRHFDLPRADQHHIPSPYPYRHPLGDDPQALIAASVAALEAKVAALGADNVAAFFCEPIQGSGGVIVPPAGWLKAMRDACRRLGILFVADEVITGFGRTGPLFACETESVEPDLMTVAKGLTAGYAPMGAVLMSDEIYEGLAGSRTESAVVGHGHTYSAHPVSAAIGLEVLKLYHEGGLLANGRAQAPRFAAGLDALRAHPLVGDARSAGLLGALELVADKARKTRFDPALNVPDKIAAAAYANGVVFRAFGDGVLGFAPALSFTAGEFDLMFERVRKTLDDVLADPGVQRALDAAHAQPA

SEQ ID NO: 11964 - protein, 534 aa, Zea mays
MAVVYYLLLAGLIACSHALAAGTPALGDDRGRPWPASLAALALDGKLRTDSNATAAASTDFGNITSALPAAVLYPSSTGDLVALLSAANSTPGWPYTIAFRGRGHSLMGQAFAPGGVVVNMASLGDAAAPPRINVSADGRYVDAGGEQVWIDVLRASLARGVAPRSWNDYLYLTVGGTLSNAGISGQAFRHGPQISNVLEMDVITGHGEMVTCSKQLNADLFDAVLGGLGQFGVITRARIAVEPAPARARWVRFVYTDFAAFSADQERLTAPRPGGGGASFGPMSYVEGSVFVNQSLATDLANTGFFTDADVARIVALAGERNATTVYSIEATLNYDNATAAAAAVDQELASVLGTLSYVEGFAFQRDVAYAAFLDRVHGEEVALNKLGLWRVPHPWLNMFVPRSRIADFDRGVFKGILQGTDIVGPLIVYPLNKSMWDDGMSAATPSEDVFYAVSLLFSSVAPNDLARLQEQNRRILRFCDLAGIQYKTYLARHTDRSDWVRHFGAAKWNRFVEMKNKYDPKRLLSPGQDIFN

SEQ ID NO: 11965 - protein, 256 aa, Selaginella remotifolia
ETWLVTTTSSSNPEVGLATGLAATGGAQDLLNPPLNKQKEPPVGRGKIEIKRIENATSRQVTFSKRRGGLLKKAHELSVLCDAQVALIIFSSTGKLFEYASTSMKEILDRYGKYPESVQGGNMASHHEASDFISHEIRRLKQQLQRSQQSRRHLLGDDLSHLPIKDLQNLEQQLEVGLSRVRSRKDQVLMDQVDELRRRELTLHKDNEMLRRRLSDVQGMAESGRSTLIVNPWRQGNLLQTWQMYPCHFLDTKAAA

SEQ ID NO: 11966 - protein, 488 aa, Ralstonia eutropha JMP134
MIQTQLYIDGRWQSPLEGSTRDILSPADESVIAQAAEGTRADARIAIAAARRAFDGPWRQTTIRDRARLLNRIAALIDRDAEELARFESLNTGKTLTESRTDMGDIAATFRYFAGLVASESGAVNEAPHHVISRTLREPVGVCGLITPWNYPLLQAAWKIAPALGAGNTVIIKPSNLTPLTTHHFTKLIAELDLPAGVFNLVTGGAEVGAELAESRDVDLVSFTGGAFAGESIMKAATGNFKRIGLELGGKNPNIVFADADLDVAVDYALNAAFFHAGQVCSAGSRLMIEDSIYDAFVAKLAERLPRIAIGNGFHAETQMGPVQSAQQHEKILRMVQAGVAEGARLVYGGKRPEGDVYRKGYWLQPTLLADVTADMNIAKDEIFGPVVTAERFRSEDDALRAANDTPYGLAAAVWTRDLDKANRMSRALRFGTVWVNDYHPYFPEAPWGGYKASGIGRELARIGLDEYTELKHSYINLAPKAMGWFGA

SEQ ID NO: 11967 - protein, 418 aa, Burkholderia cepacia R1808
MPYQHIKVPEGGDKITVNKDFSLNVSDQPIIPYIEGDGTGFDITPVMIKVVDAAVAHTYKGKRKIHWMEIFAGEKATKVYGPDVWLPDETLQVLKEYVVSIKGPLTTPVGGGIRSLNVALRQELDLYVCLRPIQYFKGVPSPVREPQKIDMVIFRENSEDIYAGIEWAAGSEQAKKVIKFLQDEMGVKKIRFPETSGIGIKPVSTEGTERLVRKAIQYAIDNDRKSVTLVHKGNIMKFTEGLFRDAGYALAQKEFGGELIDGGPWMRVKNPKTGAEIVIKDSIADAFLQQILLRPAEYDVIATLNLNGDYVSDALAAQVGGIGIAPGANLSDSVAMFEATHGTAPKYAGKDYVNPGSEILSAEMMLRHLGWTEAADTIIAAMEKSILQKRVTYDFARLMEGATQVSCSGFGDVLIENM

SEQ ID NO: 11968 - protein, 402 aa, Medicago sativa
MDEAGSSSSLPPFLAKTYEMVDDRSSDPIVSWSASNKSFVVWNPPEFARVLLSEILKHNNFSSFIRQLNTYGFRKVDPEQWEFANDDFIRGQPHLMKNIHRRKPVHSHSLHNLQAQASLTESERQSMIDEIEKLKQDREQLLVETKRYQHDWERHEIQMHCSKDQLEKLEHKQQKMLSSVSEALQKPMIAVNLLPLAEAMERKRRLPARSVCFNNEASVEDAMETSVALPRENSEDNFYFDVKHREIGSTSRHPWHFGKTLAHEVGDNFVHTHSNMDLDESTCCADRLSISCQQLDGEVRPKSPEIDMNVEPAAAALEAVAVKEQPARITTAATGVNDVFWEQFLTEDPGASEAQEVQSERKDNSSRKNEGKPSDHGRFWWNMRKSNNHPEQMGHVSQVEKI

SEQ ID NO: 11969 - protein, 480 aa, Burkholderia cepacia R18194
MLPAAHIAGQPVRTHADAPGAPIFDASTGAAIGWQEFATAAHVDAAVRAARDAFAGWRDTPPAERGRILAKIAERVEASRDRLAALQMQVSGKPPFEAEADVGDVAATFAYYAKLCEDPALFAAEPVALPSDAVTAERFYDSVGVAALVMPWNFPMVTTAWKLAPALAAGCAVVLKPSELTSPTEHALLDIVAEAGVPAGVVNVVNGGAEVGAALTAHPLIDKISFTGSTAAGRKVMQAAAVDMKRVTLELGGKSSLIVRDDADLDVAVSLAVAGAFTNAGQMCSATARILVHDSVYRSFMAAFETAVRALVVAPPAAEQVAMGPLISAAQRTRVEAMLQQGIDAGARVAFSGRVADAGGDGFFMAPVVIAEPAADNPLWTDEVFGPVACVKSFRTDDEAIALANDTRYGLVATVVTRDAAIAKQFQQRVRAGLVWINAPQLIYPHVCWGGFGLSGIGRELGVAGLRSYQELRHAMHAID

SEQ ID NO: 11970 - protein, 188 aa, Brassica napus
  misc_feature (43)..(43): Xaa can be any naturally occurring amino acid
  misc_feature (155)..(155): Xaa can be any naturally occurring amino acid
  misc_feature (160)..(160): Xaa can be any naturally occurring amino acid
  misc_feature (174)..(174): Xaa can be any naturally occurring amino acid
STQRVRCERICGVLLIEELGLENEAEKPSNALLTRAWSPGWSXADKILTEFIEKQLIDYAKNSKKVVGNSTYLLSPYLHFGEISVRRVFQCARMKQIIWARDKNGQGVESAVLFLRGIGLRDYSRYICFNFPFTHEQSLLSHLRFFPWDADVEKXKAWRXGRTGYSEVDAGMRXELWATGLMHNRIRV

SEQ ID NO: 11971 - protein, 232 aa, Guillardia theta
MIQYALKSNASYHSRFKLKKRRRRIGKTDYKKRMKLIRQDKKKFENKKKRIIIRFSKRNLSLQMVNSNVDGDFILLSSYLKNLSKLEYKNLTNNYPFSYLLGYYFGKDLIEKVKQSETYNKKNYSSKITAIIDIGLKRATIGNKSFASMKGSVDSGINIPHNYNKIFKVKNNEIDSKELFNERSKGIHIIKYIDLLKNEDEEKLKKQFSNIFLSRDSLSTIKKNYLIKNKNK

SEQ ID NO: 11972 - protein, 375 aa, Rubrobacter xylanophilus DSM 9941
MSGGAAFAPGLEGVVATRTRLSMVDGAAGRLVIAGFPVEELAGRASFEETLYLLWNGVLPDAGRLEGLRGDLAARRALPEAAGEVLEAAVAGGAAPIDALRMAAGTLAPSGNDRDDALTSVAAFPTIVAACWRLSQGREPVEPDPGLSHAANYLYMLSGEVPGEERVRALETYLNTVSDHGMNASTFAARVISSTGSDLISAVVGAIGALKGPLHGGAPGPALDVVFEIGEPGRAEGVLRERLDRGERLMGFGHRVYKVRDPRADVLAGAAERLYASDADEELYRLALEVERTALRLLEEYKPGRNLDTNVEFYTALLLHGLGLPTGLFTPTFAVGRVAGWTAHCLEQRETGRLIRPQSEYVGPEARKWVPLEER

SEQ ID NO: 11973 - protein, 300 aa, Triticum aestivum
  misc_feature (40)..(40): Xaa can be any naturally occurring amino acid
  misc_feature (70)..(70): Xaa can be any naturally occurring amino acid
  misc_feature (109)..(109): Xaa can be any naturally occurring amino acid
MAMSDLAAAVISKPHGAVVGVSPAKIREVWADNLEAEFAXIRDVVDDYPYIAMDTEFPGIVCRPLGASPXSFRSNDEYNYATLKANVDMLSLIQLGLTLSDENGALPAXATGGRPCAWQFNFRGFDPRSDPANADSIDLLRNSGIDFDRFTTEGADTGHFAELLMSSGVLLNAELQWVTFHSGYDFGYLLKLLTGRNLPDTMPGFFDLIRIYFPVLYDIKHLMKYCGSLHGGLSKLGELLGVQRVGICHQAGSDSLLTLQCFQKLKEAYFRGSTENYAGVLYGLISDGGENRPPAALLIE

SEQ ID NO: 11974 - protein, 302 aa, Zea mays
MAGMSLQHPWAFAFGLLGNVISFMTFLAPIPTFYRIYKSKSTEGFQSVPYVVALFSAMLWIFYALIKSNETFLITINAAGCVIETIYVVMYFVYAPKKAKLFTAKIMVLLNGGVFGVILLLTLLLFKGSKRVVLLGWICVGFSVSVFVAPLSIMRRVIQTKSVEYMPFSLSLSLTLSAVVWFLYGLLIKDKYVALPNVLGFIFGVVQMVLYVFYMNKTPVAATAVGKDAGKLPSAADEHVLVNIAKLNPALPERTSGMHPVTQMAAVPARSCAAEAIAPAMLPNRDVVDVFVSRHSPAVHVV

SEQ ID NO: 11975 - protein, 112 aa, Bartonella sp. af116nev
ANEACLKMLQEIGFVKRIPEFIARAKDKNDPFRLMGFGHRVYKNYDPRAKIMQKTCHEVLKELNIQDDPLLDIAIELEKIALNDEYFVEKKLYPNVDFYSGITLKALGFPTE

SEQ ID NO: 11976 - protein, 137 aa, Phaseolus vulgaris
MAQKAQKNDTDFKVPEPITPCATATAAAATSISEPSRFFDAATPATSSRSPKRSLPLEDAANADRTVASEPKRAVNRCSGCRRRVGLTGFRCRCGDLFCAEHRYTDRHDCSYDYKTVGREAIARENPVVKAAKIVKV

SEQ ID NO: 11977 - protein, 112 aa, Bartonella sp. af107nev
ANEACLKMLQEIGSVERIPEFITRAKDKNDPFRLMGFGHRVYKNYDPRAKIMQKTCHEVLKELNIQDDPLLDIAIELEKIALNDEYFVEKKLYPNVDFYSGITLKALGFPTE

SEQ ID NO: 11978 - protein, 526 aa, Triticum aestivum
  misc_feature (346)..(346): Xaa can be any naturally occurring amino acid
MAMAMRRAAALGARHILAASASASSRVASRRHMGSVDAGAAMDKIRAAGLLRTRGLIGGQWVDAYDGKTTEVQNPATGEVLANVACMGNRETADAITSANTTFYTWSKLTASERSKALRKWHDLLMSHKEELALLMTLEQGKPMKEALGEVNYGASFIEFFAEEAKRVYGDIIPPTLADRRLLVLKQPIGVVGAITPWNFPLAMITRKVGPALACGCTVVVKPSEFTPLTALAAADLALQAGIPAGALNVVMGNAPEIGGELMQSTQVRKITFTGSTAVGKKLMAGSANTVKKVSLELGGNAPCIVFDDADIDVAVKGSLAAKFRNSGQTCVCANRILVQEGIYEXFASAFVKAVQSLQVGNGLEESTSQGPLINEAAVQKVEKFVGDATSKGANIMLGGKRHSLGMSFYEPTVVGNVSNDMLLFSEEVFGPVAPLIPFKTEEEAIHLANDTNAGLAAYMFTKNIARSWRVSEALEYGLVGVNEGLISTEVAPFGGVKQSGLGREGSKYGMDDYLEIKYVCMGNLG

SEQ ID NO: 11979 - protein, 262 aa, Hordeum vulgare
MSTAEATREENVYMAKLAEQAERYEEMVEFMEKVAKTADVGELTVEERNLLSVAYKNVIGARRASWRIISSIEQKEESRGNEAYVASIKEYRTRIETELSKICDGILKLLDSHLVPSATAAESKVFYLKMKGDYHRYLAEFKAGAERKEAAENTLVAYKSAQDIALADLPTTHPIRLGLALNFSVFYYEILNSPDRACNLAKQAFDEAIAELDSLGEESYKDSTLIMQLLRDNLTLWTSDNAEEGGDEIKEAASKPEGEGHS

SEQ ID NO: 11980 - protein, 514 aa, Zea mays
  misc_feature (407)..(407): Xaa can be any naturally occurring amino acid
MDGRRTILMGRYEIGKQLGQGTFAKVFYARNLTTGLAVAIKMINKDKVMKVGLMEQIKREISIMRLVKHPNILQLYEVMASKSKIYFVLEYAKGGELFNKIAKGGKLSEDVARKYFQQLVSAVDFCHSRGVYHRDLKPENLLLDENENLKVSDFGLSALAESKRQDGLLHTTCGTPAYVAPEVLSRKGYDGAKADVWSCGVILFVLVAGYLPFHDTNLIEMYRKISRAEFRCPRFFSTELKDLLHKILVPDPSTRISISRIKRSAWYRKPVEAHAKKNEAETSENTCTGEGTTSVSTECSTSEGNQGPLSLPNLNAFDIICLSTGFNLSGFFEDKYGRREERFTTRQPVTTVFTKLKELAKRLKLKVNKKENGTLKLAAPKEGKKGMLELDAEIFEVAPSLLLVELXKKTNGDTLEYQKLVKEEIRPALKDIVWVWQDDQHQCSQLPESLLSPPETQDELRLSLPQQEGQDFLEAPLPSLSLDQLKSPTAPEQAEQLPQPEQLQTPIAPEEQIN

SEQ ID NO: 11981 - protein, 124 aa, Glycine max
  misc_feature (49)..(49): Xaa can be any naturally occurring amino acid
MEPMDIVGKAKEDASLPKATMTKIIKEMLPPDVRVARDAQDLLIECCVXLGFGEYIEEVYAAYEQHKLESMQDSLKGAKWSNRAEMTEEEALAEQQRMFAEARARMNGGAIQSKEPEADQSLES

SEQ ID NO: 11982 - protein, 86 aa, Zea mays
KARPFCRRCAPGLNWPGRASGAVTLKKLECSKQAIALDTLAWDNIILPPLGVFFKFGCGVEFWICLILTFFGYLPGIIYAVWAITK

SEQ ID NO: 11983 - protein, 90 aa, Triticum aestivum
MASFARGAASLTRIGLSTSKTPLQLIHRRGLADHHGPPKVAYWKDPMSPSKWKEEHFVIVSLTGWGLLIYGGYKLATGGKGKKEEELAKA

SEQ ID NO: 11984 - protein, 423 aa, Bacillus sp. KSM-K16
MLEEKQLVESWEHEERWKGIIRPYEAADVMRLRGTLEIEYTIARRGAEKLWKLLHTEDFVPALGALTGNQAMQQVKAGLKAIYLSGWQVAADANLAGSMYPDQSLYPANSVPEVVKKINRTLQRADQISHMEGKEDIDWYAPIVADAEAGFGGQLNVFELMKSMIEAGAAGVHFEDQLSSEKKCGHLGGKVLLPTQTAVRNLIAARLAADVMGVPTILIARTDANAADLITSDVDSYDAPFLTGERTAEGFFKTKSGLDQAIARGLAYAPYADLIWCETSEPNIEEARRFAQAIHEKFPGKLLAYNCSPSFNWKAKLDDHTILNFQKQLGEMGYKFQFVTLAGFHALNHGMFELSRQYKDRGMAAYSDLQQAEFASEAHGYTATRHQREVGTSYFDEVAQVVTGGTSSTTALKGSTEAEQFQS

SEQ ID NO: 11985 - protein, 160 aa, Bacillus cereus ATCC 14579
MTVYDFSAKTITGEEKSLKDYKGKALLIVNVASKCGFTPQYKGLQEVYDKYKDQGLEILGFPCNQFGGQEPGTEADITSFCELNYGVNFPMFAKVDVKGDKAHPLYTYMTEQAPGLLGMKAVKWNFTKFLIGKDGKVVGRFAPQTKPVDLEVEIEKVLGE

SEQ ID NO: 11986 - protein, 481 aa, Pseudomonas aeruginosa UCBPP-PA14
MNGLPMNLIWFRCDLRTTDNSALLAAADGRPCVALYLLSPAQWREHDDAPCKVDFWLRNLGELQRQLAALNIPLLVRDCGHWRQAPEVIGRLCRELGIGAVHVNQEYGVNEERRDQAVGQRLREQGVAFHSHLDQLFFAPGSVLTRTGGYFQVFSQFRKVCHERLYQALPGVRPRPQPQPPHALASDPLPDAVPAFPRPADSLRRLWPAGEEVAQERLRGFADQHLADYHERRDFPALPGTSQLSPYLAAGVLSPRQCLDAALVANRGEFSGGQQGAATWINELLWREFYKHILVGYPRVSRHRPFREETEALRWRQAPAELEAWQQGRTGIPIIDAAMRQLLATGWMHNRLRMVVAMFLSKNLLIDWREGERWFMRHLIDGDLAANNGGWQWSASTGTDAVPYFRLFNPLSQSERFDPRGEFIRHWLPELAGLERKAIHDPSSLGLFAGVDYPRPMVDLKASRERALAAFRNLPPRDGRA

SEQ ID NO: 11987 - protein, 204 aa, Xylella fastidiosa Ann-1
MHLISNDFKNGQPIPVECAAGQTDGFAPNRNPHLAWDDVPENTRSFALLCIDPDVPSIPETIGRTDMEIPVTQPRIDFVHWVMSDISTDLRMIAHGSCSDGFVVGGKTMPPGPAGTHQGLNDYTKFFANTPEMAGDYYGYDGPYPPFNDLRIHRYLFRLFALDLEHLPLPKRFDGPTLLRTIQGHVLTEATLYGTYTLNPKAQK

SEQ ID NO: 11988 - protein, 353 aa, Nicotiana sylvestris
MEVISTNTNGSTIFKSGAIPMNGHQNGTSKHQNGHKNGTSEEQNGTISHDNGNELLGNSNCIKPGWFSEFSALWPGEAFSLKVEKLLFQGKSDYQDVMLFESATYGKVLTLDGAIQHTENGGFPYTEMIVHLPLGSIPNPKKVLIIGGGIGFTLFEMLRYPTIEKIDIVEIDDVVVDVSRKFFPYLAANFNDPRVTLVLGDGAAFVKAAQAEYYDAIIVDSSDPIGPAKDLFERPFFEAVAKALRPGGVVCTQAESIWLHMHIIKQIIANCRQVFKGSVNYAWTTVPTYPTGVIGYMLCSTEGPEIDFKNPVNPIDKETAQVKSKLAPLKFYNSDIHKAAFILPSFARSMIES

SEQ ID NO: 11989 - protein, 410 aa, Burkholderia cepacia R1808
MRSLSAPQAADILGVSISTLYAYVSRGLLRSLPDGASKRRRYDADEVRLLARRRADAKRAGGVAERSLDWGVPVLESRITQIADGRLYYRGIDALTLAHDATLEETAARLWDCAPARLAAASLASTGFDAAQWRDWARRWAHLAPLERTLVLLPAAAASLPGRWAPGCDAQLDTAALLLRVTAAALAGVAPRDAPVHRQLAAAWGIRRRADADLLRRALVLCADHELNPSTFAVRCIASTGTHLFGAIAGGLAALSGPRHGGETLRAGALLDEAAHAADLDRYLAQRLARDERSEGARTALAGFAHPLYPDGDPRARALLDALCTTQPERQPLRAAGALAARVEAATGLRPTIDFALAVLERTLALPAGAGFTLFAAGRTAGWIAHAIEQYADGKLIRPRARYVGSDAPG

SEQ ID NO: 11990 - protein, 274 aa, Oceanobacillus iheyensis HTE831
MEYVTLNNGLKMPQLGFGVWKVPNEEVVSPVEHALKVGYRSIDTAKVYGNEVGVGEAISNSGIPREQLFITTKVWNSDHGYDNTLKAFDESLERLGLDYVDLYLIHWPTPEFDQYVETYKALETLYKDGKVKAIGVCNFDIEYLERILNECEIVPVLNQVECHPYLQQKELRDFCEKHNIYLESYSPLMNGKEVLQSEELQNLAERKGKTVAQTILRWHLQSGMIVIPKSVTPNRIEENLDVFDFELTDTEMQEINELDRNLRSGAVPSEMNVR

SEQ ID NO: 11991 - protein, 319 aa, Nicotiana sylvestris
MEVISTNTNGSTIFKNGAIPMNGYQNGTSKHQNGHQNGTSEHRNGHQNGISEHQNGHQNGTSEHQNGHQNGTISHDNGNELQLLGSSNSIKPGWFSEFSALWPGEAFSLKVEKLLFQGKSDYQDVMLFESATYGKVLTLDGAIQHTENGGFPYTEMIVHLPLGSIPNPKKVLIIGGGIGFTLFEMLRYPTIEKIDIVEIDDVVVDVSRKFFPYLAANFSDPRVTLVLGDGAAFVKAAQAGYYDAIIVDSSDPIGPAKDLFERPFFEAVAKALRPGGVVCTQAESIWLHMHIIKQIIANCRQVFKGSVNYAWTTVPTYPT

SEQ ID NO: 11992 - protein, 121 aa, Zea mays
VERIRPAMGSDIDVSLDCAGFSKTMSTVLEATRPGGKVCLVGMGHNEMTLPLTAAAAREVDVVGVFRYKDTWPLCIDFLRSGKVDVKPLITHRFGFSQRDVEEAFEVSARGRDAIKVMFNL

SEQ ID NO: 11993 - protein, 430 aa, Nicotiana sylvestris
MEVISTNTNGSTIFKNGAIPMNGHQSGTSKHLNGYQNGTSKHQNGHHNGTSEHRNGHQNGISEHQNGHQNGTSEHRNGHQNGTSEHRNGHQNGISEHQNGHQNGTSEHQNGHQNGTSEQQNGTISHDNGNELLGNSNSIKLGWFSEFSALWPGEAFSLKVEKLLFQGKSDYQDVMLFESATYGKVLTLDGAIQHTENGGFPYTEMIVHLPLGSIPNPKKVLIIGGGIGFTLFEMLRYPTIEKIDIVEIDDVVVDVSRKFFPYLAANFNDPRVTLVLGDGAAFVKAAQAGYYDAIIVDSSDPIGPAKDLFERPFFEAVAKALRPGGVVCTQAESIWLHMHIIKQIIANCRQVFKGSVNYAWTTVPTYPTGVIGYMLCSTEGPEVDFKNPINPIDKETTQVKSKLAPLKFYNSDIHKAAFILPSFARSMIES

SEQ ID NO: 11994 - protein, 69 aa, Triticum aestivum
  misc_feature (4)..(4): Xaa can be any naturally occurring amino acid
  misc_feature (6)..(6): Xaa can be any naturally occurring amino acid
  misc_feature (8)..(8): Xaa can be any naturally occurring amino acid
  misc_feature (13)..(13): Xaa can be any naturally occurring amino acid
  misc_feature (17)..(18): Xaa can be any naturally occurring amino acid
  misc_feature (22)..(22): Xaa can be any naturally occurring amino acid
  misc_feature (28)..(29): Xaa can be any naturally occurring amino acid
  misc_feature (58)..(58): Xaa can be any naturally occurring amino acid
  misc_feature (61)..(61): Xaa can be any naturally occurring amino acid
  misc_feature (67)..(67): Xaa can be any naturally occurring amino acid
KHGXAXCXFVAIXIFNXXKLEXIVPSSXXCDVPHVDRQDYQLIDITDDGYVSLLPQSXHPXHHLQLXHH

SEQ ID NO: 11995 - protein, 371 aa, Archaeoglobus fulgidus DSM 4304
MAIYAFPEFDGESRRASRIYASARYPSRQEGNVFFDSEEVPNLKYADEMPLKIRNFYSVVAFRPSHIFLSRDVLGGRPLYYGSDMSISSFKSYIDGEVYEVMPGEVVKMDYTGEILERRKYAFEDVFRVGREDVNEMADRILNSLSSYKPRVGCIAFSGGVDSSLLAALYDAPLVSVTASDAEEEWLKTAARMLGKEIEILKVGESAIREVVDTVRKTIETGDFLQLSIAVPVYLTMQFAKSLGFTEIIFGQGADELFGGYKRYEGLSEHELEDALVKDLKSIGESNLVRDCKLAYKNEIKLVTPYLCWDVIDAALKIPPEYKVRREGGKVVRKYILRKIAEKFLPEEIAWRDKKAIQYSTGIAKILKKCL

SEQ ID NO: 11996 - protein, 426 aa, Psychrobacter sp. 273-4
MADNQATLTVDGKDYQLPITEGTLGPSVIDVAAFQKAGYWTYDPGFMATAPVESKITFIDGGKGELLHRGYPIDQLANNAEYLEVAYALIHGDLPNAEQKADFYEKIRKHMGVHDQLRKFFEGFRRDAHPMAIMVGVVGALSAFYHENLDISNEEHREITAIRLIAKMPTLAAMSYKYSKGEPFMYPRNDFNYAENFLYMMFATPADVNYKTNDVITRAMDKIFTLHADHEQNASTSTVRLAGSTGANPYACIAAGIAALWGPSHGGANEAVLEMLDEIGSVENVPEFMEKVKSREVKLMGFGHRVYKNFDPRAQVMKETCDEVLGALGINDPKLELAMALEKIALEDPFFVERNLYPNVDFYSGIILKAIGIPTSMFTVIFSLARTSGWISHWLEMHSTPFKIGRPRQLYTGETHRDFVKVEDRK

SEQ ID NO: 11997 - protein, 194 aa, Triticum aestivum
  misc_feature (94)..(94): Xaa can be any naturally occurring amino acid
  misc_feature (125)..(125): Xaa can be any naturally occurring amino acid
  misc_feature (130)..(130): Xaa can be any naturally occurring amino acid
  misc_feature (144)..(144): Xaa can be any naturally occurring amino acid
  misc_feature (149)..(149): Xaa can be any naturally occurring amino acid
EISRHSSVESIDICEIDQLVIDICKEFFPHLSVGFEDPRVQLHVGDAVEFLRNAPEGTYDAIIVDSSDPIGPAQELVEKPFFETIARALRPGGXLCNQAESMWLHTHLIQDMLSICRETFKGSVXYAWVXPTYPSGVIGSVCAXMATGXFLTPVIIESERLTGRNRLYQNHMHVVFALQRELSHERQREYARHK

SEQ ID NO: 11998 - protein, 506 aa, Lotus corniculatus var. japonicus
MAAAFTCSAADLHPLLGTGANATAAAEFICSRFGAISNKFTDTAYAVDNTYLLFSAYLVFAMQLGFAMLCAGSVRAKNTMNIMLTNVLDAATGGIFFYIFGFALAFGTPSNGFIGKHFFGLNEFPSPSFDYGFFLYQWAFAIAAAGITSGSIAERTQFVAYLIYSSFLTGLVYPIVAHWFWSSDGWGSPARTENLLFGSGVIDFAGSGVVHLVGAVAGFWGAFIEGPRMGRFDHAGKPVPLRGHSGTLVVLGTFLLWFGWYGFNPGSFITILKSYGESGSGNYYGQWSAIGRTAVTTTLAGCSAALTTLFGKRLQTGHWNVTDVCNGLLGGFAAITSGCSVVDPWAAIICGFVAAWVLIGCNVLAEKFHYDDPLEAAQLHGGCGTWGIIFTALFAKKQYVNEVYAGLPDRPYGLLMGGGWRLLAAHVVQILTIAGWVSVTMGAVFFVLHKLNLLRISPEEEMAGLDMTSHGGLAYEYHEDVGSVQKALKFVFDFYCKGNYYKTLLE

SEQ ID NO: 11999 - protein, 262 aa, Triticum aestivum
  misc_feature (153)..(153): Xaa can be any naturally occurring amino acid
  misc_feature (162)..(162): Xaa can be any naturally occurring amino acid
  misc_feature (197)..(197): Xaa can be any naturally occurring amino acid
MGSTAADMAASADEEACMYALQLVSSSILPMTLKNAIELGLLETLVAAGGKLLTPAEVAAKLPSTANPAAADMVDRMLRLLASYNVVSCTMEEGKDGRLSRRYSAAPVCKFLTPNEDGVSMAALALMNQDKVVIETWYYVKDTVPFDCIAFNXAFGMLVFEXHNTHSLIIRVYIEEMNKHFNIIGKKLLEVCKVVEXLGTIVAAYPAIKGINFDLPHVISEAPPFPGVTHVGGDMFQKVPSGDAILMKWILHDWSDEHCATV

SEQ ID NO: 12000 - protein, 219 aa, Triticum aestivum
QVCTKKQAGTGPEFPGYRRPTRAPTTRSAPEFRARSISADAAPSTRTGNLAMAAASSATSVHDFTVKDASGKDVDLSVYKGKVLLIVNVASQCGLTNSNYTELSQLYPKYKDQGFEILAFPCNQFGGQEPGTNGRIVQFACTRFKAEYPIFDKVDVNGSNVSPLYKFLKSSKGGLFGDSIKWNFSKFLVDKEGHVVDRYAPTTSPLSIEKDIKKLLGSS

SEQ ID NO: 12001 - protein, 122 aa, Triticum aestivum
  misc_feature (40)..(40): Xaa can be any naturally occurring amino acid
  misc_feature (117)..(117): Xaa can be any naturally occurring amino acid
MAPTVMASSATSVAPFQGLKSTAGLPVSRRSNGASSAASXNGGRIRCMQVWPIEGIKKFETLSYLPPLSTEALLKQVDYLIRSKWVPCLEFSKVGFIFREHNASPGYYDGRYWTMWXLPMFG

SEQ ID NO: 12002 - protein, 216 aa, Triticum aestivum
MSPLACGFEADRSRRRAMPDSDNEDSGNAGGELSSPREQDRFLPIANVSRIMKKALPANAKISKDAKETVQECVSEFISFITGEASDKCQREKRKTINGDDLLWAMTTLGFEDYVDPLKHYLHKFREIEGERAAATSTSTTPDMPRNNNNATGYADAPGGMMMMGQPVYGSPPPPQQQQQHQHQIAMGGRAGFPYHGGGGGGGGSSSSSGFGRKEG

SEQ ID NO: 12003 - protein, 356 aa, Zea mays
  misc_feature (31)..(31): Xaa can be any naturally occurring amino acid
  misc_feature (54)..(54): Xaa can be any naturally occurring amino acid
  misc_feature (274)..(274): Xaa can be any naturally occurring amino acid
PQRKLDCIKRLGFGLLNKVSMLFPHVFWSTXLDTFGHLVENPRRRGEFFLTSSXAAVAGGPLLMALVAGEAAHNFETMPPTDAVSSALQILRGIYEPQGIEVPDPLQSVCTRWGTDSFSLGSYSHVAVGASGDDYDALAESVGDGRLFFAGEATTRRYPATMHGAFISGLREAANITLHANARATKSKVDRSPSTNTQACAATLTDLFRQPDLEFGSFSVIFGGKASDPKSPAILKVELGASRKKNTAEGVKTEQNHSNKLLFQQLQSHFNQQXQLYVYTLLSRQQAMELREVRGGDDMRLHYLCEKLGVKLVGRKGLGPGADAVIASIKAERNRSRTRPGPSKLKKSLKPNVAAS

SEQ ID NO: 12004 - protein, 102 aa, Brassica napus
SGRVGSVYERKASIREFYAVIFPSLLQLQRGITDLEDRKQKEVCSMRYRKKDEGKKCELSEIEMEREEECGICMEMNSLVVLPNCTHSLCIKCYRDWRGRSQ

SEQ ID NO: 12005 - protein, 179 aa, Glycine max
  misc_feature (114)..(114): Xaa can be any naturally occurring amino acid
MASSMISSPAVTTVNRAGAGMVAPFTGLKSMAGFPTRKTNNDITSIASNGGRVLCMQVWPPIGKKKFETLSYLPDLDDAQLAKEVEYLLRKGWIPCLEFELEHGFVYREHYRSXLEYYDGRYWTMWKLPMFGCTDASQVLKELQEAKTAYPNGFIRIIGFDNVRQVQCISFIAYKPPGF

SEQ ID NO: 12006 - protein, 289 aa, Zea mays
MGGGRVMATAAKVAGIGVAKGGFRGGFGVPAAANDQFIVRNTSASKPVSASISSAVHPSVEEDAVVMRKPVWEDEWEFAEVETKTIPRVVFDKPPSLQEAKEATDDLKDALNMACMEGSNEVGSVSRMFSSFQPSENRAVESAVPQVALKAFAFLSENTAAQSVVTSIASDPKVWDAVMENKDLMKFLETNTASTKDEADNDDKSELSSETESEEDSEEKPIQLMEILRDMKLKAVQMMENVSSYFGGLFRTETFTEGGQERKRMLLNDPTTLFGLAVCVIFMVVLKRA

SEQ ID NO: 12007 - protein, 395 aa, Methanosarcina barkeri str. fusaro
MNEQGLSEKEIFSYLEDVKSEDTDYYRVLSSMCTHPHRIAVEAHRLFIEANLGDLGLFAGAHRLEKEVIRMLGELLHAQSVEIPSGEACESSVCGYLTTGGTESNIQAIRGMKNLVTEDGKKSGEILNIVVPESAHFSFDKVANMMGIEVKRASLDPEFRVDIASAESLIDANTIGLVGIAGNTEFGQVDPIEELSKLALENELFLHVDAAFGGFVIPFLEKPYSFDFKVPGVTSIAIDPHKMGLSTIPSGALLFRSPFFMDSLKVNTPYLTTKSQFTLTGTRSGASAAATYAVMKYLGREGYRKNVQYCMQLTTKLVKEARKFGFEPLIEPVMNVVDLRVPNPDIVREQLLKKFGWNVSITRNPRSLRLVLMPHNTARDIEEFLQDLRKVTTEL

SEQ ID NO: 12008 - protein, 220 aa, Bacillus cereus ATCC 14579
MNLKQLAGEYAANFVNDGMKIGLGTGSTVYWTIQKLGERVKEGLSFQAVPTSKETEALAQQLNIPLISLNDVQSLDLTIDGADEIDSNLQLIKGGGGALLREKIVASSSKKLIIIADESKLVTHLGTFPLPIEIIPFSWKQTENKIQSLGCQTTLRLKNNETYITDNNNMIIDCIFPNHISNPVHLHTQLKMITGVVETGLFISMTSTAIIGTKNGIKKL

SEQ ID NO: 12009 - protein, 273 aa, Arabidopsis thaliana
MYICTNVHLSPLSLHHLACEFINSCEMEPRINDLQVESRVHELLDFPVHTNQISSAIYEILLQCPNDHIENPKKKPYNCPHSGAKCDVTGDIQRLLLHLRNDHNVEMSDGRSFSHRYVHHDPKHLHHATWMLTVSYITDYLALFLQLCEFLSFNPLETMQLLDCCGRKFCLYFEAFHLRKTPMYMAFMQFMGDEEEAMSFSYSLQVGGNGRKLTWQGVPRSIRDSHKTVRDSQDGLIITRKLALFFSTDNNTTDKELKLKVSGRVWREQPVSI

SEQ ID NO: 12010 - protein, 174 aa, Triticum aestivum
  misc_feature (92)..(92): Xaa can be any naturally occurring amino acid
  misc_feature (97)..(97): Xaa can be any naturally occurring amino acid
  misc_feature (124)..(124): Xaa can be any naturally occurring amino acid
  misc_feature (135)..(135): Xaa can be any naturally occurring amino acid
  misc_feature (145)..(145): Xaa can be any naturally occurring amino acid
  misc_feature (164)..(164): Xaa can be any naturally occurring amino acid
  misc_feature (169)..(169): Xaa can be any naturally occurring amino acid
DAIGVTPLYIGWGIDGSVWISSEVKGLNDDCEHFEIFPPGHLYSSKQGGFKRWYNPPWFSEVIPSVPYDPLALRKAFEKAVIKRLMTDVPFXVLLSXGLDSSLVAAVTVRHLAGTKAAKRWGTXLHSFCVGLEGXPDLKAAKEVXNYLGTMPMSSPSCSDGIDXIEDVXYHPNI

SEQ ID NO: 12011 - protein, 122 aa, Oryza sativa
IMRILKDYNQYVMRNLARGYSRKDLGVAYVKEKQLQVNMKINKLRETVKAHQEKLQTVAKTAGINHEEWLANADRWVAGFLEKFEEHCHNMETAIKGRIQEKLRRQTSRGIIGGLMQQPVAA

SEQ ID NO: 12012 - protein, 319 aa, Agrobacterium tumefaciens str. C58
MRTIYRYDICLRLKPIAPTPVKERLLPLTGLFRRPCFQQTGETPMYDVSANGANIPALGFGTFRIPEDDVRRILPEALKLGFRHVDTAQIYKNEGAVGEVIAQSGISRHDIFLTTKVWVDRYRHDDFLASVDESLAKLKTDYFDLLLLHWPKSDVPLAERMGALNAVRKAGKARNIGISNFNVALTEEAVKLSDTPLATNQIEYHPYLDQTKVISAARKHGMSVTAYYLMADGKVPNDPVLKDIGAKHGKTAAQVTLRWAVQQPDIVALSKTATESRLKENFDIFDFALSEEEMQAIHALAKPNGRIVSPGHLAPDWDD

SEQ ID NO: 12013 - protein, 112 aa, Bartonella sp. af108nev
ANEACLKMLQEIGSVKRIPEFIARAKDKNDPFRLMGFGHRVYKNYDPRAKIMQKTCHKVLKELNIQDDPLLDIAIELEKIALNDEYFVEKKLYPNVDFYSGITLKALGFPTE

SEQ ID NO: 12014 - protein, 50 aa, Enterococcus faecalis
KGFGFISPEDGNDVFVHFSAIQGDGFKTLEEGQAVTFDVEDGHRGPQAAN

SEQ ID NO: 12015 - protein, 193 aa, Triticum aestivum
DASCLDRPLLPSPRAPPSPSSSSIPMQQRRGRPSGTDGSDFSYRMVVDSRYQRVADGRSRLARLMLVQTLHQVAGGALLLLSLSKGTEINKFAVLSLAAGLLAILLGEFGRRRTVAVFLRLYTSLSSIAIAFSVTCIIRSDLFVKITKQNTADITSYEMFDVVRVALGVLLQLVVIATTTRLLQNMSPPKRTS

SEQ ID NO: 12016 - protein, 50 aa, Pediococcus pentosaceus
KGFGFITREDGSDVFVHFSAIQSDGFKTLEEGQSVSFDVEESDRGPQAAN

SEQ ID NO: 12017 - protein, 363 aa, Escherichia coli O6
MSKNYHIAVLPGDGIGPEVMTQALKVLDAVRNRFAMRITTSHYDVGGAAIDNHGQPLPPATVEGCEQADAVLFGSVGGPKWEHLPPDQQPERGALLPLRKHFKLFSNLRPAKLYQGLEAFCPLRADIAANGFDILCVRELTGGIYFGQPKGREGSGQYEKAFDTEVYHRFEIERIARIAFESARKRRHKVTSIDKANVLQSSILWREIVNEIATEYPDVELTHMYIDNATMQLIKDPSQFDVLLCSNLFGDILSDECAMITGSMGMLPSASLNEQGFGLYEPAGGSAPDIAGKNIANPIAQILSLALLLRYSLDADDAASAIERAINRALEEGIRTGDLARGAAAVSTDEMGDIIARYVAEGV

SEQ ID NO: 12018 - protein, 439 aa, Zea mays
MTPFHFSTSPAAHFSVSARECGEKGGNSPLSGRRIPPFLFGARTRTPHAAQCTPPFPPPCCCESATTGGKIFSFTFLPFPPAHARALIDAMGDAAASTSAPTTPTSILICLEDGSDLLADADDGAGTDLVVARDERLLVVDQDEEYVALLLSKESASGGGGPVEEMEDWMKAARSGCVRWIIKTTAMFRFGGKTAYVAVNYLDRFLAQRRVNREHAWGLQLLMVACMSLATKLEEHHAPRLSEFPLDACEFAFDRASVLRMELLVLGTLEWRMVAVTPFPYISCFAARFRQDERRAVLVRAVECVFAAIRAMSSVEYQPSTIAVASILVARGRETPAGNLDALKAILGSSFPQLDTGHVYSCYSAMIREDDKSPTQSTSTSTGVASSGVSVAAHAGGSGSPSPPGASVSVGANNAAGTAPPATTDNRNKRRRLRSPQRQ

SEQ ID NO: 12019 - protein, 140 aa, Pirellula sp. 1
MTMSDEATAVAEYSAEAKELGDKIANMTLKQAKELSDYLKDEHGIEPAAGGGAVMMAGPAGDGGGAAEVEQTEFDVVLTGFGEKKLNVVKVVKNITGASLMDAKKMVEGCPATLKEAVSKEDAEKVKAEIEEAGGSVELK

SEQ ID NO: 12020 - protein, 173 aa, Oryza sativa (japonica cultivar-group)
MAGVGRNMLAPLLVLNLIMYLIVIGFASWNLNHFINGQTNYPGVAGNGATFYFLVFAILAGVVGAASKLAGVHHVRAWRHDSLATNAASSLIAWAITALAFGLACKEIHIGGHRGWRLRVLEAFVIILAFTQLLYVLMLHTGLFGGGDGAYRDHDYGVGAGAAAGEPKGTARV

SEQ ID NO: 12021 - protein, 229 aa, Brassica napus
  misc_feature (221)..(221): Xaa can be any naturally occurring amino acid
MALENQSAARFTGKVNWFNDSKGFGFITPDDGTTEELFVHQSSIVSEGYRSLAIDDLVEFEIAQGTDGKTKAVEVTAPGGAPLKKKEASSRGRSGRGGGCYNCGEAGHLAKDCRDGGERGACYTCGDTGHLARDCVQKPSGERGGGRGGGGGCYQCGDTGHLARDCDNIGGGGRSSGGCYECGGAGHMARDCEKRGSGGGGGRSSGGGGGGKCYKCGEGGXFARECSVA

SEQ ID NO: 12022 - protein, 509 aa, Triticum aestivum
MASFARQEHQFLAELGLAPRNPGSFACGAWGGSGPVVTTTNPSNNEVIAEVVEASMDDYEKGMSACFDAAKTWMAIPAPKRGEIVRQIGDALRAKLHHLGRLLSLEMGKILPEGIGEVQEIIDMCDYAVGLSRQLNGSIIPSERPNHMMMEVWNPLGVVGVITAFNFPCAVLGWNACIALVCGNCVVWKGAPTTPLITIAMTKIVASVFEKNNLPSAIFTAFCGGAEIGQAIALDTRIPLVSFTGSTKVGQMVQQQVSARFGKCLLELSGNNAIIVMDDADIPLAVRSVLFAAVGTAGQRCTTCRRLLLHESIYQTFLDQLVEVYKQVRIGDPMEKGTLLGPLHTTASKESFLKGIQNIRSQGGKILLGGSAIESEGNFVQPTIVEISPSAPVVREELFGPVLYAMKFQTLKEAIEINNSVPQGLSSSIFTRKPDAIFKWIGPHGSDCGIVNVNIPTNGAEIGGAFGGEKATGGGREAGSDSWKQYMRRATCTINYGSELPLAQGINFG

SEQ ID NO: 12023 - protein, 408 aa, Picrophilus torridus DSM 9790
MIYAGNFYYKDHFEYLEIDVNNGIITSIKKNIPGKKIKLNGAVMPAGTDSHVHFRDPGETYKEDFSTGTMSAIFGGTTTIIDMPNNKIRIDNYQAFSDKLAIVSRKAYCDFGLYSMFTGDNSLIIDKRSTGIKIYMGNTTNTNGSDITNEEISKIKDLNVPVFFHAEDSECLKKHYFNAKNLKEYDKSRPVECEILSVEKIKNYDLNTKVIAHKTFIDKIEMLSEASPHHLLLNNDMDLGSYGKVNPPLRSRSAQSLLLNSYISGNFDILSSDHAPHSQNEKTDFEYALPGIIGVETRIPLMLALVSKKILPIDVFYKTAIYNPAKLFKIRKGVIDNGYYADFFSFDYHNIERLNDYKLHSKNPVSPFNGFDVIFPDSVVLRGDVIIDNREILDERSGKFINELNQSA

SEQ ID NO: 12024 - protein, 344 aa, Escherichia coli
TPDCYQAADWRHRGYHAVELPGGDDYPQSRSGAGSRLHHGAEARQSDAVLCLALAELAIRAGVPAGVFNVVTGSAGAVGNELTSNPLVRKLSFTGSTEIGRQLMEQCAKDIKKVSLELGGNAPFIVFDDADLDKAVEGALASKFRNAGQTCVCANRLYVQDGVYDRFAEKLQQAVSKLHIGDGLDNGVTIGPLIDEKAVAKVEEHIADALEKGARVVCGGKAHERGGNFFQPTILVDVPANAKVSKEETFGPLAPLFRFKDEADVIAQANDTEFGLAAYFYARDLSRVFRVGEALEYGIVGINTGIISNEVAPFGGIKASGLGREGSKYGIEDYLEIKYMCIGL

SEQ ID NO: 12025 - protein, 197 aa, Brassica napus
  misc_feature (143)..(143): Xaa can be any naturally occurring amino acid
MCGILAVLGCTDDSQAKRVRVLELSRRLRHRGPDWSGIYQHGDNYLAHERLAIVDPDSGDQPLFNEDKTIVVTVNGEIYNHEELRKDLKNHKFRTGSDCDVISHLYEEHGENFVDMLDGVFSFVLLDTRDNSFMVARDAIGVXSLYIGWGLDGSVWISSEMKGLHEDCEHFEVFPPGVLYSSKSGGFKQWYNPPWYN

SEQ ID NO: 12026 - protein, 372 aa, Zea mays
PRVRSKTKIYIVMELVTGGELFDKIASRGRLKEDDARKYFQQLINAVDYCHSRGVYHRDLKPENLLLDASGTLKVSDFGLSALSQQVREDGLLHTTCGTPNYVAPEVINNKGYDGAKADLWSCGVILFVLMAGYLPFEDSNLMSLYKKIFKADFSCPSWFSTSAKKLIKKILEPNANNRITIAELINNEWFKKGYQPPRFETADVNLDDVNSIFDESGEPAQLVVERREERPSVMNAFELISTSQGLNLGTLFEKQTGSVKRETRFASRLPANEILSKIEAAAGPMGFNVQKRNYKLKLQGENPGRKGQLAIATEVFEVTPSLYMVELRKSNGDTLEFHKFYHNISNGLKDVMWKPESGIVEGDEARQRRSP

SEQ ID NO: 12027 - protein, 486 aa, Bordetella parapertussis 12822
MEDLRNHEFKNYIGGQWVACAAGKTYPNVNPADTDDIVGRFQASQAEDAAAAVAAAQAAFDGWRNLAVSKRAALMQRAADYLEAHAEQFGRELTREEGKALNLAKDEVLRSAQTIRFYAAEGQSFSGETFVNDDPDMVVYSQREPLGVVTVISPWNFPVSIPARKIAPALITGNTVVFKPSSDAPLSGLRLVEAFEQAGLPPGVLNLVTGSASAIGAAITQAPQVRAVSFTGSTAAGEQIHRSVDMTTRTQMELGGKNPLIVMADADLDRAVDLVVKGGFSLSGQACTGTSRVLVDAPVKAAFTEKLLAKVKALKVGNSLEGSFDLGPLATARQLESVMRYIEVGKQEARLLYGGERLDGPGYERGYYLTPAVFADVTQQMRIAREEIFGPVIALIEVNGYEDAIAKANDTEYGLAAAIATTNAQYAHRFARDIQAGTVKINRTTTGNLINAPFGGLKRSSTSTFRESGRIGLEFYTQIKTVYRAG

SEQ ID NO: 12028 - protein, 333 aa, Magnaporthe grisea 70-15
MASRAPIRRVDPELGLIWEGAPNMDTLSDVPAVRDAFASHYPDIFGLPHLPVSTQRPSHNVKSADGTQIKVMHFIPDAPAGIDAPPARAVIFCFGGGFIMGKADSNIDFAANMAIQTHSHVFMPNYRLAPEHPAPAAVEDVYATLRWVQTHAAGLGINAERVVLFGVSAGGGIATGTALMAYDKSLTSSEKLPLPAGLALRYPMLDDRTFGSIEDPEHFYHVWNCVVNKIAWTAYAGGKARAERTNDTISVYAAPARAGPDKLRGLPPTFVDVGGLDLFREEITKFVTALATAGVNVEFHHYSGLPHGVEIMAPGISKAIAMNKNTCRFIGRF

SEQ ID NO: 12029 - protein, 243 aa, Zea mays
MFGYRKADPDLEAGGSSLLYPGMTESPELRWAFVRKIYVILTVQLAMTAAVSAFVVKVPAVSNFFVSSNAGIALYIFLIVLPFIVLCPLHYYHQKHPVNLLLLGLFTVAISFAVGMTCAFTSGKIILEAAILTAVVVNSLTAYTFWAAKRGHDFNFLGPFLIAAIMVLMVFSLIQIFFPLGKISVMIYGGLASLIFCGYIIYDTDNIIKRHTYDQYIWAAVSLYLDVINLFLSLLQLLRAADS

SEQ ID NO: 12030 - protein, 158 aa, Glycine max
  misc_feature (46)..(46): Xaa can be any naturally occurring amino acid
  misc_feature (92)..(92): Xaa can be any naturally occurring amino acid
  misc_feature (108)..(108): Xaa can be any naturally occurring amino acid
FLILISKQRLPHDHFPTVTTVNRAGAGLDAPLTGLKSMAGFPTRKXTNNDITSLASNGGRLQCMRGWPPGGKNNLETLSYLPDLDDAQLPKXVEYLLRKGWIPCLEFXLEHGFESREHTRKPGYYHGRYWTMWKLPMFGCTDAPEVLKELQEANTAYP

SEQ ID NO: 12031 - protein, 196 aa, Fucus distichus
MQNIKCVVVGDGAVGKTCLLISYTTNAFPGEYIPTVFDNYSANVMVDGKPINLGLWDTAGQEDYDRLRPLSYPQTDVFLVCFSVVDPTSFHNVKLKWIPELQHHAPGIPFILVGTKLDLRDDQDAIKRLAERRQTPISFSEAQGLSSDLEAYRYLECSALTQHGLKQVFDGAIRCVLEQNQRKMKKKKGKKGCVIS

SEQ ID NO: 12032 - protein, 131 aa, Hordeum vulgare subsp. vulgare
PNLLELEAPIKICGDIHGQYSDLLRLFEYGGFPPEANYLFLGDYVDRGKQSLETICLLLAYKIKYPENFFLLRGNHECASINRIYGFYDECKRRFNVRLWKVFTDCFNCLPVAALIDDKILCMHGGLSPDL

SEQ ID NO: 12033 - protein, 356 aa, Cordyceps bassiana
MSRANPPNNASASRKISFNVSEQYDIQDVVGEGAYGVVCSAIHKPSGQKVAIKKITPFDHSMFCLRTLREMKLLRYFDHENIISILDIQKPRGFDSFNEVYLIQELMETDMHRVIRTQVLSDDHCQYFIYQTLRALKAMHSANVLHRDLKPSNLLLNANCDLKVCDFGLARSAASQEDNSGFMTEYVATRWYRAPEIMLTFKEYTKAIDVWSVGCILAEMLSGKPLFPGKDYHHQLTLILDVLGTPTMEDYYGIKSRRAREYIRSLPFKKKVLFRTLFADTSDLALDLLEKLLAFNPVKRITVEEALKHPYLEPYHDPEDEPTAPPIPEEFFDFDKHKDNLSKEQLKQLIYQEIMR

SEQ ID NO: 12034 - protein, 50 aa, Bifidobacterium animalis
KGFGFITGEDGQDVFVHFSAINGEGYKSLDKGQAVSYNVKQSDRGPQAAN

SEQ ID NO: 12035 - protein, 438 aa, Zea mays
MAEKENILMQRYEMGKLLGKGSFAKVYHARNVKTSESVAIKVIDKDKIKKCGLMDQIIQEISVMKLVKHPNIVQLYEVMATKTKIYFVIEYVKGGELFKKVQRGRLKEDVARTYFQQLISAVDFCHTRQVYHRDLKPENLLLDGSHNLKISDFGLSALPNCKRKDGLLHTICGTPAYVAPEVISQKGYDGAKADIWACGVILYVLLAGYLPFQDKNMMDMYKKICKAELKWPSWFSSDVRKLLRRILHPNPNRRISIEEIRTHPWFRIGLDARLFDSTTRDYVPSDMDLALNSLNSNMVECNSAAEKLTILNAFDIISLSNGFDLSGIFENSNKESKFMSTNTAMTIITKLMEVAKSLDLKVITKTGGLLNMEAAKSGIKGVMSINAEIFQITPNYHLVEIKKINGDILEYHNFMNQSMRPALEDIVWAWHGEQPDEK

SEQ ID NO: 12036 - protein, 169 aa, Triticum aestivum
  misc_feature (54)..(54): Xaa can be any naturally occurring amino acid
  misc_feature (70)..(70): Xaa can be any naturally occurring amino acid
  misc_feature (79)..(79): Xaa can be any naturally occurring amino acid
  misc_feature (97)..(97): Xaa can be any naturally occurring amino acid
  misc_feature (100)..(100): Xaa can be any naturally occurring amino acid
  misc_feature (149)..(149): Xaa can be any naturally occurring amino acid
MAPTVMASSATSVAPFQGLKSTAGLPVSRRSNGASLGSVSNGGRIRCMQVWPIXEGIKKFETLSYLPPLXTEALLKQVXYLDPSKWVPCLRFSKLGXLPXEHNASPGYYDGRYWAMWNCLCSGCTDATQVINEGGGVKKDTLTLFRIIXSTNLKCMRSYPLNNCKIPEG

SEQ ID NO: 12037 - protein, 501 aa, Oryza sativa (japonica cultivar-group)
METRELWVLAAALAVSLLYYLAALMRYAGGGCSRSSRPPLPPGPTPLPLIGNLLSLRGVLHHRLASLARVHGPVMALRLGLTTAVVVSSRDAAAEAFTKHDRRLAARVVPDSNRAHGFSDRSIIWLPSSDPRWKALRGIQATHLFSPRGLAAVRSVRESKVRDIVAYFRSRAGEEVVFGEAIYSGVLNLVSSSFFSVNMAGVGSEEAHGLRELVEDLVEAIAKPNVSDLFPFLRQLDLQGLRRRTEERMARAFGILDGIIDRRLANRTHGDRHGDFLDALLDLVSEGKMARDHVTIMLFEVFGAGSDTMSVSLEWAMAELLRNPRAMRKARAELEDAAAVVEESDAARLPYLQAVVKEAMRLHPVGPILLPHRAVEDGVEIGGYAVPRGAMVIFNAWAIMRDPAAWERPDEFVPERFMETTTAIDFRGKEYEYLPFGSGRRLCPGLPLAERVVPFVLASLLRAFEWRLPDGVSAEDLDVSERFNTANVLAVPLKVVPVIVN

SEQ ID NO: 12038 - protein, 429 aa, Agrobacterium tumefaciens str. C58
MTEKSATVTLGEKQVELPVREGTIGPSVVDIATLYKHTGSFTYDPGFTSTASCESKITYIDGDEGVLLHRGFPIEQLAEQGDFLETCYLLLYGELPTAAQKKDFDTRVTRHTMVHEQMSRFFTGYRRDAHPMAVMCGTVGALSAFYHDSTDITDPHQRMVASLRMIAKMPTIAAMAYKYHIGQPFVYPKNDLDYASNFLHMCFAVPCEDYKVDPVLARAMDRIFILHADHEQNASTSTVRLAGSSGANPFACIAAGIACLWGPAHGGANEAALNMLNEIGSVDRIPEYIARAKDKNDPFRLMGFGHRVYKNYDPRAKIMQKTMYEVLEATGNSDDPIMQVALELEKIALSDPYFVEKKLYPNVDFYSGITLKALGFPTTMFTVLFALARTVGWIAQWNEMIEDPQQRIGRPRQLYTGAGKRDYVPVSKR

SEQ ID NO: 12039 - protein, 495 aa, Thermus thermophilus
MPLITTETGKKMHVLEDGRKLITVIPGDGIGPECVEATLKVLEAAKAPLAYEVREAGASVFRRGIASGVPQETIESIRKTRVVLKGPLETPVGYGEKSANVTLRKLFETYANVRPVREFPNVPTPYAGRGIDLVVVRENVEDLYAGIEHMQTPSVAQTLKLISWKGSEKIVRFAFELARAEGRKKVHCATKSNIMKLAEGPKRAFEQVAQEYPDIEAVHIIVDNAAHQLVKRPEQFEVIVTTNMNGDILSDLTSGLIGGLGFAPSANIGNEVAIFEAVHGSAPKYAGKNVINPTAVLLSAVMMLRYLEEFATADLIENALLYTLEEGRVLTGDVVGYDRGAKTTEYTEAIIQNLGKTPRKTQVRGYKPFRLPQVDGAIAPIVPRSRRVVGVDVFVETNLLPEALGKALEDLAAGTPFRLKMISNRGTQVYPPTGGLTDLVDHYRCRFLYTGEGEAKDPEILDLVSRVASRFRWMHLEKLQEFDGEPGFTKAQGED

SEQ ID NO: 12040 - protein, 360 aa, Agrobacterium tumefaciens str. C58
MNMVVTYKHIDEMKPWSDKLQLLECISVTPETSDVMTFLFRSEDQNWFRYLPGQFVTLELPVGSEPIYRTYTLSSSPSRPYALSVTVKAQATSIGTRWMFDNLKPGMKVRALGPLGDFSYVKHPGDKYLFISAGSGVTPMMSMVRDMSDRAPQSDITFINCSRTPGDIVFRHELEYLARFMPNLSLGFIVEKCGRTDLWSGLRGMVDKAKIALLAHDFMDRTVFCCGPEPFMAAVRSMLDASGFDMSRYHQESFAPAAPVSVGETVLTGADGEALSMVGFTLSGKELPCQPGQTVLMTARAAGVRIGAACESGICGTCRVLKLSGEVEMNHNGGILDEEIEEGYILACCSRPLTDIKVEA

SEQ ID NO: 12041 - protein, 373 aa, Arabidopsis thaliana
MGYLLEETLSSNSKTPIVIDDDNELGLMAVRLANAAAFPMVLKAALELGVFDTLYAEASRSDSFLSPSEIASKLPTTPRNPEAPVLLDRMLRLLASYSVVKCGKVSEGKGERVYRAEPICRFFLKDNIQDIGSLASQVIVNFDSVFLNTWAQLKDVVLEGGDAFGRAHGGMKLFDYMGTDERFSKLFNQTGFTIAVVKKALEVYQGFKGVNVLVDVGGGVGNTLGVVASKYPNIKGINFDLTCALAQAPSYPGVEHVAGDMFVDVPTGDAMILKRILHDWTDEDCVKILKNCWKSLPESGKVVVIELVTPDEAENGDINANIAFDMDMLMFTQCSGGKERSRAEFEALAAASGFTHCKFVCQAYHCWIIEFCK

SEQ ID NO: 12042 - protein, 112 aa, Glycine max
  misc_feature (37)..(37): Xaa can be any naturally occurring amino acid
MASSMISSPAVTTVNRAGAGMVAPFTGLKSMAGFPTXKTNNDITSIASNGGRVQCMQVWPPVGKKKFETLSYLPDLDDAQLAKEVEYLLMKGWIPCLEIQLEQRFVFREPHQ

SEQ ID NO: 12043 - protein, 435 aa, Bacillus cereus ATCC 10987
MGVITLTTGEKITVTNGVMNVPNNPIIPFIEGDGIGPDIWAAASRVLEAAVEKAYDGEKKIVWKEVLAGEKAFNQTGEWLPEETLNLIREYLIAIKGPLTTPVGGGIRSLNVALRQELDLYVCLRPVRYFEGVPSPVKRPEDTDMVIFRENTEDIYAGIEYAQGSPEAEKVLTFLKEAMGVNKIRFPETSGIGIKPISEEGTKRLVRAAIQYAINEKRSSVTLVHKGNIMKFTEGAFKNWGYEVAEQEFGDKVFTWAEYDRIVEKDGKDAANKAMADAEVAGKIIVKDSIADIFLQQILTRPREFDVVATMNLNGDYISDALAAQVGGIGIAPGANINYVTGHAIFEATHGTAPKYAGLDKVNPSSVLLSGVLLLEHLGWNEAAKLVTASVEKTIASKVVTYDFARLMEGATEVKCSEFANELIKNMDVAIIKNA

SEQ ID NO: 12044 - protein, 496 aa, Staphylococcus epidermidis ATCC 12228
MELVDKLSNRQYIDGEWVESSNKNTRDIINPYNQETIFTVAEGTKEDVERAILAARRSFEDGEWSLETSEVRGKKVRAVADKIKENREELAKLETLDTGKTLEESYADMDDIHNVFMYFAGLADKDGGEIINSPIPNAESKVVKEPVGVVTQITPWNYPLLQASWKIAPALATGCSLVMKPSEITPLTTIRVFELMEEVGFPKGTINLVLGAGSEVGDVMSGHEEVDLVSFTGGIETGKHIMKQAANHVTDVALELGGKNPNIIFDDADFELAVDQALNAGYFHAGQVCSAGSRILVHNDIKDKFEKALIDRVSKIKLGNGFDQDTEMGPVISTAHRDKIEGYMEVAKKDGATIAIGGKRPEREDLQAGLFFEPTVITDCDTSMRIVQEEVFGPVVTVEGFADEEEAIRLANDSIYGLAGAIFTKDIGKAQRVANKLKLGTVWINDFHPYFAQAPWGGYKQSGVGRELGKEGLEEYLVSKHILTNTNPEPVDWFSK

SEQ ID NO: 12045 - protein, 371 aa, Bacillus cereus ATCC 10987
MTVIRGLEGVVATTSSVSSIIDDTLTYVGYNIDDLAENATFEEVVYLLWHRKLPNEQELAEFKEIVSEYYKVPGEILAYLKQVDLKIAHPMSVLRTAISMLSLYDESAEIMDEKSNYLKAVKLQAQVGTLVAAYARIRKGLDVVEPRNDLSLAANFLYMLNDREPNEVEIEAFDKALVLHADHELNASTFTARVCVATLSDVYSGITAAIGALKGPLHGGANENVMKMLTEIGEEENVESYIHNALQNKVKIMGFGHRVYEHGDPRAKHLREMSKRLCVLLGEEKWYNMSIKIEDIVTKEKGLPPNVDFYSASVYHCLGIDHDLFTPIFAISRMSGWLAHILEQYENNRLIRPRADYNGPTHQVYVPIAQR

SEQ ID NO: 12046 - protein, 144 aa, Rubrobacter xylanophilus DSM 9941
MLSPFRGFRDLQSEMDRLFGEAFGRPPRADAEGGWTPAVDVLTRGDDLIIRAELPGVRREDVEVTVSNGVLTLAGERREEEERERAGYLIRERRQGSFRRSMTLPEGVNEDEIKATFRDGVLEVSVPGASAAVEAPPRRIEIEG

SEQ ID NO: 12047 - protein, 255 aa, Triticum aestivum
MAMEARMKGTVKWFNDTKGFGFISPDDGSEDLFVHQSSINADGFRSLAEGEVVEFAVSEGDDGRTKAVDVTGPDGSFVQVGAGGGGGGFGSRGGGGSRGGGGFGGRGGDGSGGYGGGYGGGGSGGWGGQRRSGGGGAGGACFKCGEPGHMARDCSVNGPAGGGGGGGCYKCGEQGHIARDCFNGGAGGGGGGYGGGGGGNCYSCGEPGHIARDCPTSSGFGGGGGGRFGGGGGGGGDRTCYHCGETGHISRDCTK

SEQ ID NO: 12048 - protein, 142 aa, Chlorobium tepidum TLS
MALTLYGKDPLKMFEDVFNERLTPFISSMGSMMAPAFKVDISEDEKAIYLSADIPGVKKEDVKVSIEDDVISISAERTQEEEEKKKNYHRVERSWGSLSRSFTIGDNVDSDNITANYDNGVLKVVIPKKEPEQKKSKEIAVS

SEQ ID NO: 12049 - protein, 73 aa, Triticum aestivum
MASRSCTFVEILLAVILPPLGVFLRYGCCSMEFLICLLLTILGYIPGIIYAIYVLVAHGSASEESGKDYDALA

SEQ ID NO: 12050 - protein, 365 aa, Zea mays
  misc_feature (77)..(77): Xaa can be any naturally occurring amino acid
MGSTAGDVAAVVDEEACMYAMQLASSSILPMTLKNAIELGLLEVLQKEAGGGKAALAPEEVVARMPAAPGDPAAAAXAMVDRMLRLLASYDVVRCQMEDRDGRYERRYSAAPVCKWLTPNEDGVSMAALALMNQDKVLMESWYYLKDAVLDGGIPFNKAYGMTAFEYHGTDPRFNRVFNEGMKNHSVIITKKLLDFYTGFEGVSTLVDVGGGVGATLHAITSRHPHISGVNFDLPHVISEAPPFPGVRHVGGDMFASVPAGDAILMKWILHDWSDAHCATLLKNCYDALPENGKVIVVECVLPVNTEATPKAQGVFHVDMIMLAHNPGGKERYEREFRELAKGAGFSGFKATYIYANAWAIEFIK

SEQ ID NO: 12051 - protein, 365 aa, Triticum aestivum
MGKGGKGEAAAAVAGEGENMAAWLVAKNTLKIMPFKLPPLGPYDVRVRMKAVGICGSDVHYLKEMRIAHFVVKEPMVIGHECAGIIEEVGDGVKHLAVGDRVALEPGISCWRCRHCKGGRYNLCDDMKFFATPPYHGSLADQIVHPGDLCFKLPDNVSLEEGAMCEPLSVGVHACRRADVGAEKSVLIMGAGPIGLVTMLSARAFGAPRIVIADVDDHRLSVAKSLGADAVVKVSGNTEDLAGEIERIQAAMGGDIDVSLDCAGFSKTMSTALEATRPGGRVCLVGMGHNEMTVPLTSAAIREVDVVGIFRYKDTWPLCLEFLRSGKIDVKPLITHRFGFSQGEVEEAFEVSARGRDAIKVMFNL

SEQ ID NO: 12052 - protein, 206 aa, Schizosaccharomyces pombe
MNDHLKVVVTILNLPTPISLAPYFTSSIILKYSMFRIASRQTRNLRALSSSKNWARSLVNTRSFRAAASVQNNNAQIGEMVDKISSLSLLETSELVKQLKEKLNIAEIAPMAAVAPAVASAAPSEEKAPEEKKEEKTTWNLKLESFDAGSKAKVIKEVKSLLGLSLVDAKKFVESAPKVLKENILKEDAEAIKSKLEKLSCKVVLE

SEQ ID NO: 12053 - protein, 413 aa, Arabidopsis thaliana
MGSGRYLDDPLTFTRNPPSSSSPITESSFLAESISRSGSFESGSLRGGDGDCFSDVDFALDKLAGTVQFYERHVFLCYKKPSVWPARIEASEFDRLPRLLSSVISARKSSMKKETLLTICEGHDGSETSNGDVLIFPDMIRYRRLTHFDVDTFVEEVLVKGVEWLPGNPESLSSSYVFVCCHGSRDRRCGVCGPSLVSRFREEIDSCGLRGEVSVSPCSHIGGHKYTGDVIIYGLNINQRVTGHWYGCVTLEDVPLLLEQHINKGEIVDRLWRGEMGLPEEDQKKTQEQRLQLNSEKISNREVTQESVNNSICCQSRAVPELNGSGCQQNGNSSYCLEEIHTEKNTSERVTSVKNASLRIGSSENGSSGGFKVCAVMSMWLETWEREDTYAALAVACAAASVAIAYNCYKQLK

SEQ ID NO: 12054 - protein, 350 aa, Escherichia coli CFT073
MRFLLGVLMLMISGSALATIDVLQFKDEAQEQQFRQLTEELRCPKCQNNSIADSNSMIATDLRQKVYELMQEGKSKKEIVDYMVARYGNFVTYDPPLTPLTVLLWVLPVVAIGIGGWVIYARSRRRVRVVLEAFPEQSVPEGKRAGYVVYLPGIVVALIVAGVSYYQTGNYQQVKIWQQATAQAPALLDRALDPKADPLNEEEMSRLALGMRTQLQKNPGDIEGWIMLGRVGMALGNASIATDAYATAYRLDPKNSDAALGYAEALTRSSDPNDNRLGGELLRQLVRTDHSNIRVLSMYAFNAFEQQRFGEAVAAWEMMLKLLPANDTRRAVIERSIAQAMQHLSPQESK

SEQ ID NO: 12055 - protein, 106 aa, Zea mays
MEHGSLTDSTSSTFSIMDEDHTLANSARFVLNQDPRVAFCGYTIPHPSEKKVNIRLQTTGDAAKDVLKDALQNLMIMCQHVRGTMDTAVVNHRAKNAAEEMDVDQN

SEQ ID NO: 12056 - protein, 203 aa, Candidatus Ehrlichia extremiorentalis
ESKITFIDGNKGILRYRGYNIEDLVKSCKSFIEVVYLLFYGTFSDIEDLQNFMLQISQEYMPPKIVEDVVKSFPQNSHPMAILMACFSALASYYYDQRIIKDELKCITLAVSKIAGIVAIIYRHITGQNFIQANKELTYSENFVHMMFDIFSYKFTQVVSKALDIIFILHADHEQNASTAAVRLSGSSGANLFACLGAGAATL

SEQ ID NO: 12057 - protein, 109 aa, Glycine max
MSGVWVFKNGVVRLVENPGGEAVEGSRGGRRKVLVHRASNEVITSYAVLEQKLYSLGWERYYDDADLLQFHKRSTVHLISLPRDFNKFKPMHMYDIVVKNKNAFEVRDM

SEQ ID NO: 12058 - protein, 353 aa, Aspergillus nidulans FGSC A4
MRAVRFHGRRDIRVDQIDEPSCAEGQVKIRPAFVGICGSDLHEYLSGPIAIPTTPHPLTGAQLPVTLGHEFSGTIEEVGQGVTGFKVGDRVAVRPNLSDGTCASCVYGRPNCCRSLGFIGFSSNSGGLSDYVTVPAKHAILLPESVPLDLGALVEPLTVAWHAVARSPHETARTALVVGGGPIGLAVVQVLKARGVQTVVVAEVSTQRREYALTLGATHVFNPLTDDVVARVRSLTDNAGADISFECSGVQAGFDTAMNGIRVRGTTTIVSLWEKKPMIDAFDVVSYEKHVIGAAICDDGDFEAVIGAIKDGKLNPRPMITSKIRMEDVEEKGFKALVDEKDKHVKILIDIAA

SEQ ID NO: 12059 - protein, 117 aa, Oryza sativa (japonica cultivar-group)
MARAQLVLVAVVAALLLAAPHAAVAITCGQVNSAVGPCLTYARGGGAGPSAACCNGVRSLKSAARTTADRRTACNCLKNAARGIKGLNAGNAASIPSKCGVSVPYTISASIDCSRVR

SEQ ID NO: 12060 - protein, 181 aa, Brassica napus
MASVMLSSATMASSPAHATMVAPFIGLKSSAAFPVTCKANTKVTSITSNGGRVNCMKVWPPVGKKKFETLSYLPDLTDVEIAKEVDYLIRNKWTPCIEFELEHGFVYREHGNIPGYYDGRYWTMWKLPLFGCTDSTQVLKEVKKCKQESPNPFIRIIGFDNNRQAQCISFFAYKPPSFTDA

SEQ ID NO: 12061 - protein, 217 aa, Chloroflexus aurantiacus
MQIYLDTANLAEIREAASWGILSGVTTNPTLIAREKGADFKAIITEIAELVDGPISAETISLDAEGMVREGLEYASWHPNVIIKVPSTTEGLRAVSQLAKHGIRCNVTLCFNSVQALLAARAGAFIISPFVGRVDDTGVDGMALIREIAGIYRQDREITTKILAASIRHPRHIVEAALAGADIATCPFKVLQQAMRHPLTDRGIEQFLADWKSRMSS

SEQ ID NO: 12062 - protein, 297 aa, Triticum aestivum
  misc_feature (66)..(66): Xaa can be any naturally occurring amino acid
MKTFLVFALLALAAASAVAQISQQQQQPPFSQQQQPPFSQQQQSPFSQQQQQPPFLQQQQPPFSQXHQFHHQPQQQFPQTQQPQQPFPQPQQTFPQQPQLPFPQQPQQPFPQPQQPQQPFPQSQQPQQPFPQPQQQFPQPQQPQQSFPQQQQPAIQSFLQQQMNPCKNFLLQQCNHVSLVSSLVSIILPRSDCQVMQQQCCQQLAQIPQQLQCAAIHSVAHSIIMQQEQQQGVPILRPLFQLAQGLGIIQPQQPAQLEGIRSLVLKTLPTMCNVYVPPDCSTINIPYANIDAGIGGQ

SEQ ID NO: 12063 - protein, 316 aa, Buchnera aphidicola str. APS (Acyrthosiphon pisum)
MNQLSALKQFSIIVADTSDIKSICKYQPEDATTNPSLILQAVSSNTNQNFVDQAVQYAKKKGGLYKDQIINASDKILVDLGIEILKKIPGYISSEVDARLSFSTEASILKAKKIIDLYEEQGISRNRVLIKLAATWECIKAAEELKKDSILCNLTLLFSFAQARACAESNVFLISPFVGRIYDWYISQNLLSKSFLGKDPGVISVCKIYEYYKKYGYKTIIMGASFRNIQQILYLSGCDRLTISPVLLKELESNTAKIDRNLAPPSFISVPPVALSEEEFRWEHNQDAMAVQKLSDGIRNFGKDQLRLEKIFSKKI

SEQ ID NO: 12064 - protein, 158 aa, Azotobacter vinelandii
MRDPLFGIPLDDQPRTLADFPGRAWLVVNTASRCGFTPQYEGLQMLWQRYRERGLVVLGFPCDQFGHQEPGNELEIAEFCQLRYGVDFPLFQKVEVNGPRAHPLFVELKKRAPGLLGSQRVKWNFTKFLIGREGRVVRRFAPATGPRELCGEIEALLE

SEQ ID NO: 12065 - protein, 277 aa, Agrobacterium tumefaciens str. C58
MHNVTANGATIPALGFGTFRIPGSDVLRIVPHALKVGFRHVDTAQIYGNEAEVGEAIANSGVARGDIFLTTKVWVENYGHDAFIKSVDESLKKLKTDYVDLLLLHWPNEAVSLAEQIGALNEVKEAGKVRHIGVSNFNTELMAESVKLSRAPIVTNQIEYHPYLSQDVVIAAARKAGMSVTGYFGMADGKVFNDPVLRDIGARHGKSVAQVVLRWLVQQEGVIALSKTVGEARVLENFAIFDFALSADEMAAIHALAVPGGRIVSPDGLAPVWDKAA

SEQ ID NO: 12066 - protein, 500 aa, Oryza sativa (japonica cultivar-group)
MENSQMWLLWGALSVALFFYFSTLRRRYAGGKPLPPGPTPLPLIGNLHLVGGGTFHHKLRDLARVHGPVMTLKLGLATNVVISSREAAIEAYTKYDRHLAARATPDTFRACGFADRSMVFIPSSDPQWKALRGIHASHVFTPRVLAAVRPIRERKVGDLIAYLRAHAGEEVLVGHAMYTGILNMVSFSYFSVDIVDMGSQMARELREVVDDIILVVGKPNVSDFYPFLRPLDLQGLRRWTTKRFNRVFSIMGDIIDRRLAHIRDNKPRHDDFLDSILELMAAGKIDRVNVLNMLFEAFVAGADTMALTLEWVMAELLKNPSVMAKARAELRDVLGDKEIVEEADAARLPYLQAVLKEAMRLHPVGALLLPHFAMEDGVEVGGYAVPKGSTVLFNAWAIMRDAAAWERPDEFVPERFVERTPQLDFRGKDVEFMPFGSGRRLCPGLPLAERVVPFILASMLHTFEWELPGGMTAEELDVSEKFKTANVLAVPLKAVPVLIK

SEQ ID NO: 12067 - protein, 109 aa, Glycine max
  misc_feature (28)..(28): Xaa can be any naturally occurring amino acid
  misc_feature (44)..(44): Xaa can be any naturally occurring amino acid
  misc_feature (80)..(81): Xaa can be any naturally occurring amino acid
EIFGGYLYFHKAPNKEEFHIETYHKIKXLHQYNYLRANKSTFTXNLEAHIPFLDKAFINTTISINPKSKIIKRNKRRIKXXILKRAFNNKEHPYLPKHILYRQKKQFSN

SEQ ID NO: 12068 - protein, 493 aa, Glycine max
MEPNQLFSTHFRDGTIASCIEGQHRGAIPSVIVIGAGISGLAAARSLYDASFKVTVLESRDRLGGRIHTDFSFGCPVDMGASWLHGVCNENPLAPLIRGLGLSLYRTSGDNSVLYDHDLESYMLFNIDGKQVPQQMVIEVGDTFKKILEETGKVRDEHTEDISVSQAISIVLDKHPDLRQQGLAHEVLQWFICRMEAWFAADADMISLKTWDQEHVLSGGHGLMVQGYDPVIKVLAKDIDIRLNHRVKKISSGYNKVMVTVEDGRNFVADAAIITVPIGILKANLIEFEPKLPDWKVSAISDLGVGNENKIALRFDKVFWPNVELLGTVAPTSYTCGYFLNLHKATGHPVLVYMVAGRFAYDIEKLSDEAAANFVMQQLKKMFPNASKPVQYLVSRWGTDPNSLGCYSYDLVGKPTDVYDKLRAPLGNLFFGGEAVSLDNQGSVHGAYSAGVMAAENCESYLLEKLGHAEKLSLASVRHEMLETLIPLQISRM

SEQ ID NO: 12069 - protein, 443 aa, Sulfolobus tokodaii str. 7
MLKKFNLIFSKDTGVITLSELDKKAIEISSKYKGKIQILPKVPIKSIDDFAVLYTPGIAAVSKEIAKNKELSFHYTYRWNAIAIVTDGTRVLGLGDIGPEAAMPVMEGKALIFKYLGGVDAIPLPIGTKDPDKIIETVKILEPAFGGINLEDIESPKCFYILDKLRQTVEIPVWHDDQQGTAGATLAGLITSLEITGKDPKNIRVILYGAGAANIATARLLYKYGVPYENMIVIDSKGPLYKGRNDEDSMKLENPWKYELLEKTNKIGARTIEDAFKGADVLIAASKPGPGVIKSDWIKLMNKDPIVFALANPVPEIWPDEAKNAGARIVATGRSDLPNQVNNSLIFPAVFRGALDVRAKTITDEMVIEAARELASFAREKGINENYIIPKMTEWEVYPRVAAAVGMKAIQQGIARVSLSYDEIYSSAREIINSARKLLSSLT

SEQ ID NO: 12070 - protein, 379 aa, Arabis procurrens
MITTGQIIRCKAAVAWEAGKPLVMEEVEVAPPQKHEVRIKILFTSLCHTDVYFWEAKGQTPLFPRIFGHEAGGIVESIGEGVTDLAPGDHVLPIFTGECGDWPHCHSEESNMCDLLRINTERGGMIHDGESRFSINGKPIHHFVGTSTFSEYTVIHSGQVAKINPDAPLDKVCIVSCGLSTGLEAPLNVANPKKGQSVAIFGLGAVGLAAVEGARIAGASRIIGVDLNSKRFDEAKKFGVTEFVNPKDHDKLVQQVIAEMTNGGVDRSVECTGSVQAMIQAFECVHDGWGVAVLVGVPSKDDAFKTHPMNFLNERTLKGTFFGNYKPKTDIPGLVEKYMNKELEIEKFITHTVPFSEINKAFDYMMKGEGIRCIITMGA

SEQ ID NO: 12071 - protein, 199 aa, Staphylococcus epidermidis ATCC 12228
MSESNHITWHDSEVTKKQRQHKNGHKSAVIWFTGLSGSGKSTVSVALEKELFNEGKQTYRLDGDNVRHGLNKNLGFSPEDRSENIRRIGEVAKLMVDAGALTVTAFISPYKEDREGVRALLEDNEFIEVYTKCSVEECEKRDPKGLYKKARSGEIPEFTGISAPYQAPENPEITIDTEHDTIEQSVEQIIRYLKEHEYI

SEQ ID NO: 12072 - protein, 294 aa, Saccharomyces cerevisiae
MKTLVHVASVEKGRSYEDFQKVYNAIALKLREDDEYDNYIGYGPVLVRLAWHISGTWDKHDNTGGSYGGTYRFKKEFNDPSNAGLQNGFKFLEPIHKEFPWISSGDLFSLGGVTAVQEMQGPKIPWRCGRVDTPEDTTPDNGRLPDYDKDAGYVRTFFQRLNMNDREVVALMGAHALGKTHLKNSGYEGPWGAANNVFTNEFYLNLLNEDWKLEKNDANNEQWDSKSGYMMLPTDYSLIQDPKYLSIVKEYANDQDKFFKDFSKAFEKLLENGITFPKDAPSPFIFKTLEEQGL

SEQ ID NO: 12073 - protein, 167 aa, Triticum aestivum
MCPIKREMSGESGSPSPCSGENFCSPSASPERQQARQAGWTSAPAKRPAGRTKFRETRHPVYRGVRRRGNAGRWVCEVRVPGRRGSRLWLGTFDTAEAAARANDAVMLMLAAGGAACLNFADSAELLSVPVASSYRSLDEVRHAVVEAVEDLLRREALAEEDALSGT

SEQ ID NO: 12074 - protein, 473 aa, Ralstonia eutropha JMP134
MKTLDQFYIDGQWVDPAPGATAMDIINPATEAVAGKVALGTAADVDRAVAAARAAFPAWSQTSRETRIAMLERITALYKARMTDIAEAVRTEIGAPVALCNTLQAPIGLAHLAAATETLRKFEFETEYGNNYVRHEPIGVAALVTAWNWPLSLICAKTAAALAAGCTVVLKPSEIAPLDAAIFAEIMHEAGTPAGVFNMIYGEGKTVGARLSSHPDVDVISITGSTRAGVEVALSAAPTVKRVHQELGGKSPLLILDDADLQAAVTTGVTQVMMNSGQTCIAPTRMLVPRERYAEAVAVAAAVANAIPVGDPADAATKMGPISNRAQYEKVQRMIGAGIEEGARVAAGGTGRPDGLECGFFARPTVFADVNNGMAIAREEIFGPVLVMIPYDGEEDGIAIANDTPYGLAAYVASGDTARARRVAARLRAGSVRINGAQVDLAMPFGGYKASGNGRENGAYGLAEFFECKSVML

SEQ ID NO: 12075 - protein, 379 aa, Barbarea vulgaris
MITTGQIIRCKAAVAWEAGKPLVMEEVEVAPPQKHEVRIKILFTSLCHTDVYFWEAKGQTPLFPRIFGHEAGGIVESVGEGVTDLQPGDHVLPIFTGECGDCPHCHSEESNMCDLLRINTERGGMIHDGESRFSINGKPIHHFLGTSTFSEYTVVHSGQVAKINPEAPLDKVCIVSCGLSTGLGATLTVAKPKKGQSVAVFGLGAVGLGAAEGAKMAGASRIIGVDLNPKRFEEAKKFGVTEFVNPREHDKPVQQVIADMTNGGVDRSVECTGSVQAMIQAFECVHDGWGVAVLVGVPSKDDAFKTHPMNFLNERTLKGTFFGNYKPKTDIPGVVEMYMNKELELEKFITHTVPFSEINKAFDYMLKGESIRCIITMGA

SEQ ID NO: 12076 - protein, 209 aa, Arabidopsis thaliana
MNNDDIILAEMRPKKRAGRRVFKETRHPVYRGIRRRNGDKWVCEVREPTHQRRIWLGTYPTADMAARAHDVAVLALRGRSACLNFADSAWRLPVPESNDPDVIRRVAAEAAEMFRPVDLESGITVLPCAGDDVDLGFGSGSGSGSGSEERNSSSYGFGDYEEVSTTMMRLAEGPLMSPPRSYMEDMTPTNVYTEEEMCYEDMSLWSYRY

SEQ ID NO: 12077 - protein, 475 aa, Synechococcus elongatus PCC 6301
MYEKIQPPSEGSKIRFEAGKPIVPDNPIIPFIRGDGAGVDIWPATERVLDAAVAKAYGGQRKITWFKVYAGDEACDLYGTYQYLPEDTLTAIREYGVAIKGPLTTPIGGGIRSLNVALRQIFDLYACVRPCRYYTGTPSPHRTPEQLDVVVYRENTEDIYLGIEWKQGDPTGDRLIKLLNEDFIPNSPSLGKKQIRLDSGIGIKPISKTGSQRLIRRAIEHALRLEGRKRHVTLVHKGNIMKFTEGAFRDWGYELATTEFRTDCVTERESWILANQESKPDLSLEDNARLIEPGYDAMTPEKQAAVVAEVKAVLDSIGATHGNGQWKSKVLVDDRIADSIFQQIQTRPGEYSVLATMNLNGDYISDAAAAVVGGLGMAPGANIGDEAAIFEATHGAAPKHAGLDRINPGSVILSGVMMLEYLGWQEAADLITKGISQAIANREVTYDLARLMEPAVDQPLKCSEFAEAIVKHFDD

SEQ ID NO: 12078 - protein, 416 aa, Escherichia coli
MESKVVVPAQGKKITLQNGKLNVPENPIIPYIEGDGIGVDVTPAMLKVVDAAVEKAYKGERKISWMEIYTGEKSTQVYGQDVWLPAETLDLIREYRVAIKGPLTTPVGGGIRSLNVALRQELDLYICLRPVRYYQGTPSPVKHPELTDMVIFRENSEDIYAGIEWKADSADAEKVIKFLREEMGVKKIRFPEHCGIGIKPMSEEGTKRLVRAAIEYAIANDRDSVTLVHKGNIMKFTEGAFKDWGYQLAREEFGGELIDGGPWLKVKNPNTGKEIVIKDVIADAFLQQILLRPAEYDVIACMNLNGDYISDALAAQVGGIGIAPGANIGDEYALFEATHGTAPDIAGQDKANPGSIILSAEMMLRHMGWTEAADLIVKGMEGAINAKTVTKDFESLMDGAKLLKCSEFGDAIIENM

SEQ ID NO: 12079 - protein, 330 aa, Bartonella taylorii
STASCESKITYIDGNKGILLYRGYPIDQLAEKGDFLESCYLLLYGELPTKQEKHDFDRCIMQHTMVHEQFARFFHGFRRDSHPMAVMVACLGAMSAFYHDSIDITDPQQRMIASVRLISKVPTLAAMAYKYSIGQAFVYPRNDLSYAANFLRMCFCVPCEEYKINPVLTRAMDRIFILHADHEQNASTSTVRLAGSSGANPFACIAAGVACLWGPAHGGANEACLKMLQEIGSVERIPEFIARAKDKNDPFRLMGFGHRVYKNYDPRAKIMQKTCHEVLKELNIQGDPLLDIAMELEKIALNDEYFVEKKLYPNVDFYSGITLKALGFPT

SEQ ID NO: 12080 - protein, 330 aa, Bartonella taylorii
STASCESKITYIDGNKGILLYRGYPIDQLAERGDFLESCYLLLYGELPTQQEKHDFDRCIMQHTMVHEQFARFFHGFRRDSHPMAVMVACLGAMSAFYHDSIDITDPQQRMIASVRLISKVPTLAAMAYKYSIGQAFVYPRNDLSYAANFLRMCFCVPCEEYKINPVLTRAMDRIFILHADHEQNASTSTVRLAGSSGANPFACIAAGVACLWGPAHGGANEACLKMLQEIGSVERIPEFIARAKDKNDPFRLMGFGHRVYKNYDPRAKIMQKTCHEVLKELNIQGDPLLDIAMELEKIALNDEYFVEKKLYPNVDFYSGITLKALGFPT

SEQ ID NO: 12081 - protein, 262 aa, Glycine max
MVSISDHELVLIFGLLGNIVSFMVFLAPLPTFYTIYKKKSSEGFQSIPYAVALLSALLLLYYGFIKTNATLIITINCIGCVIEVSYLAMYIIYAPRKQKISTLVMILIADIGGFGLTMLITTFAVKGINRVHAVGWICAIFNIAVFAAPLSIMRRVIKTKSVEFMPFSLSLFLTLCATMWFFYGFFDKDNFIMLPNVLGFLFGISQMILYMIYKNAKKNGEINCTEQQERDGTVNSKQHSCNGNKLDFPSLVEMKENQLNQV

SEQ ID NO: 12082 - protein, 330 aa, Bartonella grahamii
STASCESKITYIDGDKGILLYRGYPIDQLAEKGDFLESCYLLLYGELPTQQEKNEFDRCIMQHTMVHEQFARFFHGFRRDSHPMAVMVACLGAMSAFYHDSIDITDPHQRMIASVRLISKVPTLAAMAYKYSIGQAFVYPRNDLSYAANFLHMCFAVPCEEYKTNPVLARAMDQIFTLHADHEQNASTSTVRLAGSSGANPFACIAAGVACLWGPAHGGANEACLKMLQEIGSIKRIPEFIARAKDKNDSFRLMGFGHRVYKNYDPRAKIMQKTCHKVLKELNIQDDPLLDIAIELERIALSDEYFIEKKLYPNVDFYSGITLKALGFPT

SEQ ID NO: 12083 - protein, 330 aa, Bartonella grahamii
STASCESKITYIDGDKGILLYRGYPIDQLAEKGDFLESCYLLLYGELPTQQEKNEFDRCIMQHTMVHEQFARFFHGFRRDSHPMAVMVACLGAMSAFYHDSIDITDPHQRMIASVRLISKVPTLAAMAYKYSIGQAFVYPRNDLSYAANFLHMCFAVPCEEYKTNPVLARAMDQIFTLHADHEQNASTSTVRLAGSSGANPFACIAAGVACLWGPAHGGANEACLKMLQEIGSIKRIPEFIARAKDKNDPFRLMGFGHRVYKNYDPRAKIMQKTCHEVLKELNIQDDPLLDIAIELEKIALSDEYFIEKKLYPNVDFYSGITLKALGFPT

SEQ ID NO: 12084 - protein, 96 aa, Glycine max
  misc_feature (17)..(17): Xaa can be any naturally occurring amino acid
DSSMISYPADTTDNPAXAEMTAPFTDLNALHVLPTIKTNNELTSIASNPGKLLCMQVCTPLVNKKFETLSYLPDLDDATFEDEPEYLLMNGWIPCL

SEQ ID NO: 12085 - protein, 330 aa, Bartonella grahamii
STASCESKITYIDGDKGILLYRGYPIDQLAEKGDFLESCYLLLYGELPTQQEKNEFDRCIMQHTMVHEQFARFFHGFRRDSHPMAVMVACLGAMSAFYHDSIDITDPHQRMIASVRLISKVPTLAAMSYKYSIGQAFVYPRNDLSYAANFLHMCFAVPCEEYKTNPVLARAMDQIFTLHADHEQNASTSTVRLAGSSGANPFACIAAGVACLWGPAHGGANEACLKMLQEIGSIKRIPEFIARAKDKNDPFRLMGFGHRVYKNYDPRAKIMQKTCHEVLKELNIQDDPLLDIAIELEKIALSDEYFIEKKLYPNVDFYSGITLKALGFPT

SEQ ID NO: 12086 - protein, 487 aa, Bacillus sp. KSM-K16
MAIKTEVVFGNYINGRWKQEAASPLASINPSDAEEVVGYVQNSTADVVDEAVEVAKGALLSWRKLTGAERGHYLYQAANQLESRLDEIAETLAREMGKTLPEAKGETARGVAILRYYAGEGLRADGEVIPSTDSEALMFTKRVPLGVVGVITPWNFPIAIPVWKIAPALIYGNTVVFKPATEAAVTAAKVVECFAQAGLPKGVLNLVTGSGKVIGNALVAHEHVHGLTFTGSEQTGKQIGKAAAARGAKYQLEMGGKNPVIVAEDADLHVAVDATISGAFRSTGQKCTATSRVIVAEAILQDFQELLLEKTKQITIGKALDDGVWMGPCASEAQLRTVLDYIEIGKKEGAKLLCGGKRVTDGNRAAGYFVEPTIFTNVNRHMRIAQEEIFGPVIALITAKNMEEAIEIANDSRYGLSASIFTTNIEKMLLFIDEMDAGLVRVNAESAGVELQAPFGGMKASSSHSREQGQAAKEFYTSIKTVFVKGR

SEQ ID NO: 12087 - protein, 447 aa, Chlorobium limicola
MADPNHRNSLTITDNRTGKSYELPIENGTVRTMDLRQIKASEDDFGLLGYDPAFLNTCSCKSQITFIDGEKGILRYRGYPIEQLAEKSSFLETAYLLIKGELPDKERLAVWTYNIRHHTMTHANLTKFMDGFRYDAHPMGILVGTVGALSTFYPDAKQVSEEESRKLQVRRLIGKIPTLAAMSFRHSLGFPYVLPDNDLSYAGNFLSMMFRMTEQKYEPNPVLEKALDVLFILHADHEQNCSTNAVRSVSSSMVDPYSAIAAGCAALYGPLHGGANEAVIRMLEGIGSVDNIPAFIKSVKSGEGRLMGFGHRVYKNYDPRARIIKKIAFEVFEETGRNPLLDIAIELERIALEDDYFVGRKLYPNVDFYSGLIYQAMGFPTDMFPVLFAIGRTPGWLAQWIEHVKDPEQRIARPRQIFLGAPCRDYVPLDERPSRGDDEEKFGICRL

SEQ ID NO: 12088 - protein, 144 aa, Zea mays
MAMAYKMATEGMDVKEECQRWFMEMKWKKVHRFVVYRIDERSRAVLVDRVGGPGEGYEELVAALPGDDCRYAVFDFDFVSVDNCQKSKIFFIAWSPAASRIRAKILYATSKQGLRRLLDGVHYEVQATDPSEMGFDETVLPIDY

SEQ ID NO: 12089 - protein, 125 aa, Thermus thermophilus
MALDIERIKEELSQATVLELKQLIDALKEAWGVTAAAPVAVAAAPAAGAAAAPAEEKTEFDVILKEAGAKKLEVIKDVRAITGLGLKEAKDLAEKGGPVKEGVSKQEAEEIKKKLEAVGAVVELK

SEQ ID NO: 12090 - protein, 120 aa, Gossypium hirsutum
MASSMSLKPACVAVLCMVVGAPLAQGAVTCGQVTSSLAPCIGYLTGNGAGGVPPGCCGGIKSLNSAAQTTPDRQAACKCIKSAAAGISGINYGIASGLPGKCGVNIPYKISPSTDCNSVK

SEQ ID NO: 12091 - protein, 161 aa, Lilium sp.
FLRSISMGSKLTREEYNTLLAAFHKLMVRLEVASVPKDATPADIKNLPDAYLYFIDMPGVRTGEIKVEVEDDSDLVISGGRKREEEEKYQIMERWTGRRMRKFELPKNADTKAVSAVWKNGVLAVTVGKLLAWEVAGLFFNIERLPVPLPTKTKSIEVKIA

SEQ ID NO: 12092 - protein, 226 aa, Triticum aestivum
  misc_feature (109)..(109): Xaa can be any naturally occurring amino acid
  misc_feature (143)..(143): Xaa can be any naturally occurring amino acid
SGRGKALHQYDCLRANKATSAWGLEARVPFLDKDFINEAMSIDPEWKMVRPDLGRIEKWVLRKAFDDEEQPFLPKHILYRQKEQFSDGVGYSWIDGLQAHAASNVADKXCLSNAKFIFPHNTPTTKEAYYYRMIFERFFPTEXAILTVPGGPSVACSTAKAIEWDAQWSENLDPSGRAALGVHLAAYEHEQDPKHVPDTIAAGGSKKPRTIRVAAAPPPPGVAIEG

SEQ ID NO: 12093 - protein, 483 aa, Arabidopsis thaliana
MVITANDLSKWENFPKGLKVLLLLNGCDSDGDGSSAAETRSELESMDYIVTTFTDETEALSAVVKNPESFHIAIVEVNMSAESESFKFLEAAKDVLPTIMISTDHCITTTMKCIALGAVEFLQKPLSPEKLKNIWQHVVHKAFNDGGSNVSISLKPVKESVVSMLHLETDMTIEEKDPAPSTPQLKQDSRLLDGDCQENINFSMENVNSSTEKDNMEDHQDIGESKSVDTTNRKLDDDKVVVKEERGDSEKEEEGETGDLISEKTDSVDIHKKEDETKPINKSSGIKNVSGNKTSRKKVDWTPELHKKFVQAVEQLGVDQAIPSRILELMKVGTLTRHNVASHLQHRKNILPKDDHNHRWIQSRENHRPNQRNYNVFQQQHRPVMAYPVWGLPGVYPPGAIPPLWPPPLQSIGQPPPWHWKPPYPTVSGNAWGCPVGPPVTGSYITPSNTTAGGFQYPNGAETGFKIMPASQPVSVNNSLFSF

SEQ ID NO: 12094 - protein, 224 aa, Lactococcus lactis subsp. lactis Il1403
MDNLKKQVGIKAAEFVKSGMVVGLGTGSTAAYFVEELGRRIAEEQLEITGVTTSNVTSSQARALGIPLASIDEVDYVDLTVDGADEIDSSLNGIKGGGAALLMEKIVATYSKDYIWIVDESKLSENLGSFKIPVEVIPYGSQQVFKKFEAAGYAPTWRLNEENERLITDMHHFIIDLHISQIKEPEKLAEELDLMGGVVEHGLFNNMVKKVIVAGNEGVRIINK

SEQ ID NO: 12095 - protein, 279 aa, Zea mays
MATPAAEKPEDVEIREVWADNLETEFAVIRDIVDDYPYVAMDTEFPGVVCRPLGTYKSAAEFNYATLKANVDMLKLIQLGLTLSDEHGGLPALGPDGRPCVWQFNFRGFDPRTDVAAADSIDLLRRSGIDFSRHAADGVDSRCFAELLMSSGVVLNSDVHWVTFHSGYDFGYLLKLLTGTNLPDTLPGFFDLIKIYFPVIYDIKHLMRFSNSLHGGLNKLAELLDVARVGICHQAGSDSLLTALSFKKLKEAYFNGLTEKYAGVLYGLGFEGVETTSAH

SEQ ID NO: 12096 - protein, 499 aa, Candida tropicalis
MAISSLLSWDVICVVFICVCVYFGYEYCYTKYLMHKHGAREIENVINDGFFGFRLPLLLMRASNEGRLIEFSVKRFESAPHPQNKTLVNRALSVPVILTKDPVNIKAMLSTQFDDFSLGLRLHQFAPLLGKGIFTLDGPEWKQSRSMLRPQFAKDRVSHISDLEPHFVLLRKHIDGHNGDYFDIQELYFRFSMDVATGFLFGESVGSLKDEDARFSEAFNESQKYLATRATLHELYFLCDGFRFRQYNKVVRKFCSQCVHKALDVAPEDTSEYVFLRELVKHTRDPVVLQDQALNVLLAGRDTTASLLSFATFELARNDHMWRKLREEVISTMGPSSDEITVAGLKSCRYLKAILNETLRLYPSVPRNARFATRNTTLPRGGGPDGSFPILIRKGQPVGYFICATHLNEKVYGNDSHVFRPERWAALEGKSLGWSYLPFNGGPRSCLGQQFAILEASYVLARLTQCYTTIQLRTTEYPPKKLVHLTMSLLNGVYIRTRT

SEQ ID NO: 12097 - protein, 309 aa, Glycine max
MSLIAEAPNFLKLYSDGSVKRFDPEIVPASLESTKGYKSKDVIIDSSKPITGRIFLPDYPTSSKKLPLLVYFHGGGFCIGSTTWLGYHNFLGDFSVTSQSIILSVDYRLAPEHRLPIAYEDCYTSLEWLGDQVSCEPLLQQIDLTRVFLSGDSAGGNIAHHVAVKAIQNNECPLKIKGLMLIHPYFGSEKRTKNEMADESIKDVAMNDMFWRLSIPEGLNRDYFGCNFEKTDLSTSVWSKFPAIGVYVAGKDFLKERGVRYAEFLKKKGVKEVELVEAKEETHVFHVYYPESCATRLLQNQMSLFMEKY

SEQ ID NO: 12098 - protein, 154 aa, Brassica napus
  misc_feature (143)..(143): Xaa can be any naturally occurring amino acid
  misc_feature (150)..(150): Xaa can be any naturally occurring amino acid
MAAALASRISRGGRSLLGGLKNDFSGSMTSSTGMMNGSILLPQQQQQRRTFIQMGTVLKVVDNSGAKKVMCIQALKGKKGARLGDTIVASVKEAMPNGKVKKGAVVYGVVVRAAMQRGRVDGSEVRFDDNAVVLGDNKDKKTXTDRQPIXTRVF

SEQ ID NO: 12099 - protein, 220 aa, Zea mays
MCGILAVLGCSDCSQARRARILACSRRQAPVHCTGTELFSYRNHKESNGRETRMGRSEKEHGNLTRSSNPVLKHRGPDWSGLYQHEGNFLAQQRLAIVSPLSGDQPLFNEDRTVVVVANGEIYNHKNVRKQFTGAHSFSTGSDCEVIIPLYEKYGENFVDMLDGVFAFVLYDTRDRTYVAARDAIGVNPLYIGWGSDGQTQTQRGVAFSQCGRAKQSTPA

SEQ ID NO: 12100 - protein, 352 aa, Triticum aestivum
  misc_feature (24)..(24): Xaa can be any naturally occurring amino acid
  misc_feature (121)..(121): Xaa can be any naturally occurring amino acid
  misc_feature (150)..(150): Xaa can be any naturally occurring amino acid
GRLKEDAARKYFQQLICAVDFCHXSRGVYHRDLKPENLLLDENSNLKGAAAGAGTISECRRLDGLLHTSCGTPAYVAPEVINRKGYDGAKADIWSCGVILFVLLAGYLPFQDKNLMNMYKXRLGKAEFKCPSWFPSDIRRVLAKGFLDPXNPSTRISIERIMEHPWFRKGLDAKPRGRNLQAKDAGPAADMTATSDPLSCSNSATEGKEQEAKKLSNLNAFDIISLSTGLDLSGMFEDNDKKRESKFTSTNSASTIVSKIEDIAKCMRLKLVKKDGGMMRMESFKPGRKGVMSIDAEIFEVTPDFHLVELKKTNGDTIEYQKVLNQEMRPALKDIVWAWQGEQQPPPPPQSC

SEQ ID NO: 12101 - protein, 503 aa, Muscari armeniacum
MSFTDHHYLLLILFLIPILVYTIRRKISSTKSKLPPCPPKLPLIGNLHQMGTLPHQSLHALSVKYGPLMLLKLGQIPTLIVSSADMAREIMKTHDHIFASRPSLMTAGIILYGSMDVVFAPYGEHWRQMRKLCVNHLLSPKAVQSFRRMHEEEVATMVAKISEVSSSSGVVNMSETLNLFASNAMLKAISRKLFRDERRSRVICELNEETAAILGQFSVSDFMPLLAWFDMVFGVGARAKKTARLWDRVLHEIIEDCRNRRDSEVNTDFVNVLLALLEDNDMDFSLNKDIIKAVLQDMIAAGTETSSTAMDWCMAELVRNPEAMKKLQDEVRGIANTKPMITDDDLSKMGYLKAVIKELLRLHPPVPLLIPRESMDHCEVQGFDIPKQTRVIVNAWSIGRDPNVWEAPEEFRPERFLDCAINFRGHDFELIPFGAGRRICPGMQFAVSTLELALANLVRSFDWELPDGMNNEDLGMGDGPGLSARRRQSLLLVAKPFLGLKCM

SEQ ID NO: 12102 - protein, 512 aa, Candida tropicalis
MLDQILHYWYIVLPLLAIINQIVAHVRTNYLMKKLGAKPFTHVQRDGWLGFKFGREFLKAKSAGRSVDLIISRFHDNEDTFSSYAFGNHVVFTRDPENIKALLATQFGDFSLGSRVKFFKPLLGYGIFTLDAEGWKHSRAMLRPQFAREQVAHVTSLEPHFQLLKKHILKHKGEYFDIQELFFRFTVDSATEFLFGESVHSLKDEEIGYDTKDMSEERRRFADAFNKSQVYVATRVALQNLYWLVNNKEFKECNDIVHKFTNYYVQKALDATPEELEKQGGYVFLYELVKQTRDPKVLRDQSLNILLAGRDTTAGLLSFAVFELARNPHIWAKLREEIEQQFGLGEDSRVEEITFESLKRCEYLKAVLNETLRLHPSVPRNARFAIKDTTLPRGGGPNGKDPILIRKDEVVQYSISATQTNPAYYGADAADFRPERWFEPSTRNLGWAFLPFNGGPRICLGQQFALTEAGYVLVRLVQEFPNLSQDPETKYPPPRLAHLTMCLFDGAHVKMS

SEQ ID NO: 12103 - protein, 319 aa, Lactobacillus johnsonii NCC 533
MKRIGILTSGGDAPGMNAAIRAVTRTALANGIEVCGIRYGYAGLVAGDIFQMTSETVADKISRGGTFLYSARFPEFKEEEVQLKGIEQLKKHGIDALVVIGGDGSYHGALKLTRHGYNAIGLPGSIDNDIPYTDYTIGFDTACNTAMEAIDKIRDTATSHQRVFVVNVMGRDCGDIAMHVGVATGADAIVIPEEPYDIKEIAENLKQGFANGKKHGIVVLAEGVMDAEKFKDELLKYGDFDARANVLGHMQRGGSPTMRDRVVASEMGAYAVKLLLEGKGGLAVGMENNKLTHHDILDLFDAKHHGNYALYSLNKDLAK

SEQ ID NO: 12104 - protein, 480 aa, Bacillus subtilis
MHPRFFLIHSFPLTHKLEKLEYERKRCGSVEKTKLTGRIVTRDDPDYNEARTNINLSLERYPDIIVFCQNKQDALNALKWARENRVPFRIRGGRHSYENFSLLNNGLVIDLSEMKKITVNQDKKLAYIEAGAELGEVYRTLWQYGLTLPAGTIANVGLTGLTLGGGIGLLTRAAGLTCDSLVQLEMIVADEKEGADLITVSCSNHPDLFWASQGGGGGNFGIVTSMTFKAVPISQVSIFSITWGWDDFEEVYNTWQNWPPYTDDRLTSSIEFWPKEVNRIEALGQFVGPKTELKKLLKPLLKAGSPTSGMVKTTPFIEAVTFFNSPGGNQPQKMKRSGSFIEKPLSERAISTIKHFLEHAPNQNASVWQQALGGAAGRVAPDQTAFYYRDAIIAQEYLTNWTSPGEKRQNVRWIEGLRTSLSKETMGDYVNWPDIEIRNWPRTYYGENVERLRRVKTTYDPENVFRFEQSIPPLRRSLFF

SEQ ID NO: 12105 - protein, 260 aa, Triticum aestivum
  misc_feature (168)..(168): Xaa can be any naturally occurring amino acid
MLRENTMASLVFLVALLLSCSSMSSAARYLEEAVPKKEYPPHLIVPELPKPELPPHPVVPELPKPEPPHPLVPEVPHPVVPKSPKEPEVPHPVVPEVPKHELPPHPAMPELPKPELPHPAVPEVPKEPEVPHPVVPEVPKEHELPHPVVPEVPKEPEVPHPVVPEVTXEPKVPHPVVPGVPKEHELPHPAMPELPKPEMPHHAVPEVPKEPHVSHPEVPKEPELPHPAVPEVPKHEMPPFPKAELPPKPEFHFPEPEAKP

SEQ ID NO: 12106 - protein, 75 aa, Triticum aestivum
  misc_feature (34)..(35): Xaa can be any naturally occurring amino acid
  misc_feature (42)..(42): Xaa can be any naturally occurring amino acid
MSEGTANCVDILIAIILPPLGVFLKVRGAARFWXXLLLTFLXYTPGIIYAIYAIHQRTPTHPPDDIHSLYRVSYA

SEQ ID NO: 12107 - protein, 307 aa, Glycine max
MSRALEHDYIGLAENPSMDGKNSSSLNLKETELRLGLPGCESPERKSGSALCLFGKELQNNNNNVCSLKAGAKRGFSDAIDTSSVTEGSQGASALFSPRGGNVGKPLIGLDTQTNTTIKEVGAVPQSAKPVQENNDQFAATNAHAIAPAAKAQVVGWPPIRSFRKNTMASNLTKNNDEAEGKSGFGCLYVKVSMDGAPYLRKVDLKTYNNYMELSSALEKMFSCFTIGQCNSPGLPGKDGLSESSLRDLLHGSEYVLTYEDKDGDWMLVGDVPWEMFTDSCRRLRIMKGSEAIGLAPRAMEKSRSQN

SEQ ID NO: 12108 - protein, 136 aa, Zea mays
  misc_feature (120)..(120): Xaa can be any naturally occurring amino acid
MTRVIHDSGDGMQKEALDLVSSDVNFPKGCFPDYRIGPNNQIIDPEETHEAVPLKEVVAKETAQLVEQHRRLSVRDLKEKFEKGLSSASKLSEEAKRREAASLDRQVLLKKLRDVLDTLXRSCGWSNKDDAEEAIS

SEQ ID NO: 12109 - protein, 364 aa, Pichia anomala
MSEKTIVVLPGDHVGTEITNEAIKVLKAIEEVRPNVKFNFQHHLIGGAAIDATGVPLPDEALEAAKKADAVLLGAVGGPKWGTGAVRPEQGLLKIRKELNLYANLRPCNFASESLLELSPIKAEFAKGTDFTVVRELVGGIYFGERKEDDGSGVASDTETYSVPEVQRITRMAAFMALQHNPPLPIWSLDKANVLASSRLWRKTVTETIEKEFPQLTVQHQLIDSAAMILIKSPTTLNGIVITSNMFGDIISDEASVIPGSLGLLPSASLASLPDTNKAFGLYEPCHGSAPDLPANKVNPIATILSAAMMLKLSLDLFEEGVALEKAVKEVLDAGVRTGDLRGSNSTKEVGDAAVEAAKRILKN

SEQ ID NO: 12110 - protein, 144 aa, Arabidopsis thaliana
MTNVRLPILVSSVLFLVFISSSLLFPTPSFAARVSHSLVQEEVKKVPEYTEPEEPEVPEEPELPSPEEPEIPEEPEIPEEPEVPGEPEVPEEPEEPEEPAGSTFEFPSWFPSFPIPGVNGGLPKTEKTKPTSTVEEVNVSNKKP

SEQ ID NO: 12111 - protein, 314 aa, Thermus thermophilus
MDYGMYFFEHVTPYETLVRRMERVIASGKTPFQDYFLFESKGFGKVLILDKDVQSTERDEYIYHETLVHPAMLTHPEPKRVLIVGGGEGATLREVLKHPTVEKAVMVDIDGELVEVAKRHMPEWHQGAFDDPRAVLVIDDARAYLERTEERYDVVIIDLTDPVGEDNPARLLYTVEFYRLVKAHLNPGGVMGMQTGMILLTHHRVHPVVHRTVREAFRYVRSYKNHIPGFFLNFGFLLASDAFDPAAFSEGVIEARIRERNLALRHLTAPYLEAMFVLPKDLLEALEKETMVSTDQNPFYVTPEGEARQAPYKG

SEQ ID NO: 12112 - protein, 115 aa, Zea mays
HVDYACTPEEVQQHFNSCGTVNRVTILTDKFGQPKGFAYVEFVEVEAVQEAIKLNESELHGRQLKVAPKRTNVPGMKQPRGRGFNPYRPYGYSPYGYGYGYGRFPRFRRPRRPYF

SEQ ID NO: 12113 - protein, 499 aa, Oryza sativa (japonica cultivar-group)
MENSQVWLLWGALSVAVLFYLSTLRRRYAGGKPLPPGPTPLPLIGNLHLAGGTFHHKLRDLARVHGPVMTLKLGLATNVVISSREAAIEAYTKYDRHLAARATPDTFRACGFADRSMVFIPSSDPQWKALRGIQGSHVFTPRGLAAVRPIRERKVGDLIAYLRAHAGEEVLLGQAMYTGLLNLVSFSYFSIDIVDMGSQMARDLREVVDDIISVVGKPNISDFYPFLRPLDLQGLRRWTTKRFNRVFSIMGDIIDRRLAHIRDGKPRHDDFLDSLLELMATGKMERVNVVNMLFEAFVAGVDTMALTLEWVMAELLHNPAIMARVRAELSDVLGGKEAVEEADAARLPYLQAVLKEAMRLHPVGALLLPHFAAEDGVEIGGYAVPRGSTVLFNAWAIMRDPAAWERPDEFVPERFLGRSPPLDFRGKDVEFMPFGSGRRLCPGLPLAERVVPFILASMLHTFEWKLPGGMTAEDVDVSEKFKSANVLAVPLKAVPVLIK

SEQ ID NO: 12114 - protein, 195 aa, Rhodospirillum rubrum
MEQASKGSGGGDWLIRGVFSLGLALASFGGPASAQAAGAHDYSFPAIDGGTLPLAAWAGHPVLVVNTASECGFTAQYEGLEALWKAYRAKGLIVLGVPSNDFGGQEPGSAAEIKDFCESTFAVDFPLTDKTAVSGARAHPFYAWAKASRPDLSAPRWNFHKYLIAPDGSLAASFSALTDPKDRDLTDAIDKLLEK

SEQ ID NO: 12115 - protein, 175 aa, Oryza sativa (japonica cultivar-group)
MELSVVGGEPLLAVAMQQLLDLDLPDELERQLNPPTRAYVRDRRAMANTPMDVKELRASGALVLAVDMPGVAPADVRVEVEDGNVLAISGERRRPAGDGDDGGEGVKYLRMERRMGKFMRRFPLPESADLDGVRAEYKDGVLTVTVDKKPPPEPKKPRVVEVKVAGAGEPKGKGK

SEQ ID NO: 12116 - protein, 336 aa, Zea mays
  misc_feature (194)..(194): Xaa can be any naturally occurring amino acid
  misc_feature (271)..(271): Xaa can be any naturally occurring amino acid
  misc_feature (283)..(283): Xaa can be any naturally occurring amino acid
  misc_feature (294)..(294): Xaa can be any naturally occurring amino acid
IGYLEAGRERLTGGNAWVVVVALQVRWIRALYSNFSEFTADQERLISLGSGGGGGRRFDYVEGFVVAAQGLINNWRSSFFSPQNPVKLTSLKHHSGVLYCLEVTKNYDDETAGSVDQDVDTLLGELNFLPGTVFTTDLPYVDFLDRVHKAELKLRAKGMWEVPHPWLNLFVPASRIADFDRGVFRGVLGGRTRXAGGPVLIYPMNKHKWDPRSSAVTPDEEVFYLVAFLRSALPGAAGEAWRALARQNQRILDFCAGAGIGAKQYLPGHKXARHEWAEHFGAXRGWDRFARLKXAEFDPRAILAAGQGIFRAARLAGARRPTRNVIQLLILIIRRV

SEQ ID NO: 12117 - protein, 498 aa, Triticum aestivum
KKNILIEKLHIDISPSLAPWRLVPVSGIENICSSSIDNLGLESSKDEESSNALLSRAWSPGWRNAEKTLEDFVSHGLLDYSKDRMKVAGTTTSLLSPYLHYGEVSVRKIYQLVRVQQIKWENEGKSGAGESVNLFLLSIGLREYSRYLCFNFPFTHERSLLGNLKHYPWRADEDRFKSWRQGMTGYPLVDAGMRELWATGWTHNRIRVIVSSFAVKFLQIPWTWGMKYFWDVLLDADIESDILGWQYISGSLPDGHELGRLDNPEVQGQKYDPDGEYVRTWIPELARMPGEWIHHPWDAPSSILEVAGVELGFNYPMPIVELHTARECLDDAISTMWQLDTAEKLAELDGEVVEDNLSHIKSFDVPKVVLKELSPHCDREVPTDDGRNLELQPKELKGTNKQTICVDVIKASKMEDTGSIANSPISRKRSSSGSVFNVPSYSSSVEVHSQNQHPGGYLVGSSKYILQKAERNCVGKAEDDDSADSGTNTSRASKRPAA

SEQ ID NO: 12118 - protein, 488 aa, Rubrobacter xylanophilus DSM 9941
MTTAAERVRVAGVEVSPDHFIGGERVASPRRFEDISPITNEPIAEVSRAGEAEVDAAVRAARDAFPGWAALGPAGRAPYLHRLADLIDANVERLAAVECMDMAMLLRSLRARVIRRGARNYRAYADLAASYEERDWRSQGTWNRVQRMPAGPAAIITPWNAPFMLSTWKTAPALAAGCTVVLKPAEWSPLSCSLLADLVAEAGFPPGVFNVVQGIGEEAGAALVAHPLLRRVSFTGSPETGRSIGVAAAKNLVPFTAELGGKGPLIVFEDADLDAAARRAAGQYDDAGQVCLAGTRLLVQESVAEEFLELFHRYADEHVLGDPRSEHTTVSPLIHPDHLRRVEGFVERARREGHRVLRGGRRSPAGPLFYQPTLIEPLSNDAEIVQREVFGPVLTLQTFADEEEAVSLANSTEYGLSGIVYTSSMGRADRVGRAVRAGVVWVNTFLVRDLTAPFGGMGISGIGREGGDYALDFYSDLKTLQILEGSTR

SEQ ID NO: 12119 - protein, 512 aa, Candida tropicalis
MLDQIFHYWYIVLPLLVIIKQIVAHARTNYLMKKLGAKPFTHVQLDGWFGFKFGREFLKAKSAGRQVDLIISRFHDNEDTFSSYAFGNHVVFTRDPENIKALLATQFGDFSLGSRVKFFKPLLGYGIFTLDGEGWKHSRAMLRPQFAREQVAHVTSLEPHFQLLKKHILKHKGEYFDIQELFFRFTVDSATEFLFGESVHSLRDEEIGYDTKDMAEERRKFADAFNKSQVYLSTRVALQTLYWLVNNKEFKECNDIVHKFTNYYVQKALDATPEELEKQGGYVFLYELAKQTKDPNVLRDQSLNILLAGRDTTAGLLSFAVFELARNPHIWAKLREEIESHFGSGEDSRVEEITFESLKRCEYLKAVLNETLRLHPSVPRNARFAIKDTTLPRGGGPNGKDPILIRKNEVVQYSISATQTNPAYYGADAADFRPERWFEPSTRNLGWAYLPFNGGPRICLGQQFALTEAGYVLVRLVQEFPSLSQDPETEYPPPRLAHLTMCLFDGAYVKMQ

SEQ ID NO: 12120 - protein, 170 aa, Pasteurella multocida subsp. multocida str. Pm70
MKEEVMKVTSSAIKNGAFEDKYGKRGKQFSPNGMPTYSIPFDISEVPVGTKSFAVVLEDKDAITASGFVWIHWLIANLERTSVQENESLTATDYVQGANSWASVLGKFDIAEASFYGGMAPPNSLHRYELIVYALDCKLDLSAGFRFNDLHFAMQGHILDQAVIMGTYDV

SEQ ID NO: 12121 - protein, 469 aa, Methanosarcina acetivorans C2A
MLKNVQKLGKFLIIICMIFIALSSPAFAATAEENAVAIEGVQTALTFVWLLLASGLVFFMHAGFSLVETGLTRSKNTANILMKNFMTIVLGILIYWAVGWGVMYGADAAGLIGTDQFFLSGADNALWNGWFFQMVFAATGATIVSGAMAERTNFKAYLIYCIMMVAVIYPVYGHWVWSGADLALLTGADSPIVQAIGVPSHDFAGSGVVHSIGGYSALAGVLLVGARIGKFKDGKAVPIPGHNLTIAFLGTLILALGWIGFNGGSTLDGNDPYMNLVVVNTFLAAAAGAVVTMLITWMKTGKPDPSLTANGLLGGLVAITAPCGSVNNWAAIIIGAIAGIIIYAGVMFNENTLKVDDPVGAIAVHGYCGSWGLISVGLFSIGIGNGILADAAYAAEVPGLFYGGGISLLLIQLISVLCSIVWAFGISFIIFKILDAVVGLRVSEEEEIMGLDICEHGIRAYPEYLMREE

SEQ ID NO: 12122 - protein, 294 aa, Zea mays
MTMYSQSVRAPPPPPCRFVPRPCYVMARPLLVFTPSGALLKAAVRDVWASNFDEELSNLSAVLPRYPCVCVDTEFPGAVHDSDLPRYMRGPRESYELVKRNVDDLKLLQVGIALSGPAGRFPIAWQFNIRGFDPALHPHAPASIAMLREQGMDFAMLNEFGIDPEDFAAGFRCSGLACGRLTWTAFSGSYDFGYLAKALTGGQPLPDTVDGFLALVRRLFGHSVFDVKHLARCCAMRGGLEQVATALGVKRAAGRAHCAGSDSLLTTDVLLLMLHRFFRNVDVLAHAGTIVDLT

SEQ ID NO: 12123 - protein, 321 aa, Haemophilus somnus 2336
MIKKIAVLTSGGDAPGMNAAIRGVVRSALSEGLEVYGIYEGYYGLYHNKIQQLTRYSVSDIINRGGTFLGSARFPEFKDPAVREKCVEILRSHGIDALVVIGGDGSYMGAKLLTEEHDFPCVGIPGTIDNDVAGTDYTIGYQTALETAVEAIDRLRDTSSSHKRISIVEIMGRHCSDLTISAAIAGGCEYIVASEIEFNREELIKQIERAIIKGKRHAIIAITELLCDVNELAREIEARVKHETRATILGHIQRGGTPCAFDRILGSRMGVYAVDLLLQGKGGYCVGIQNEQLVHHDIIDAINNMRREFKADWLAMSKRLD

SEQ ID NO: 12124 - protein, 383 aa, Anabaena variabilis ATCC 29413
MAKHLGKKIAPIPMSTDISVVDLIDNYFTAYNSARLREASQLLACDILKDGVTVGVSLSGAMTPAGFGVSALAPLIRNGFIDWMISTGANLYHDMHYGLGFELFAGNPFLDDVKLREEGTIRIYDIIFGYDVLLETDAFIRKILQAEPFQKRMGTAEFHYLLGKYVREVEKQLGVKHSCLLATAYEYGVPIYTSSPGDSSIGMNVAALALEGSQLVLDPAIDVNETAAIAYNAREGEGKSAAVILGGGSPKNFLLQTQPQIHEVLGLEERGHDFFVQFTDARPDTGGLSGATPAEAVSWGKIDPDELPSTIVCYTDSTIALPLVTAYILNQCPPRPLKRLYDRREELYDKLRTDYLAAKDQPVEKVATNGEVATYPCGTPIRQ

SEQ ID NO: 12125 - protein, 133 aa, Triticum aestivum
MAESAAIAPPPQPMTPPQPMAENATEAPPQPMAPPQQMAENATAAPPPQPMAENATAAPPPQPMVENATVVVVVPPPPPDSTTTFLCLILAFFLPPLGVFLKYKCEIEFWICLILTFLAYAPGIIYAVWVIVK

SEQ ID NO: 12126 - protein, 161 aa, Glycine max
MEPMDIVGKSKEDASLPKATMTKIIKEMLPPDVRVARDAQDLLIECCVEFINLVSSESNEVCNREDKRTIAPEHVLKALQVLGFGEYVEEVYAAYEQHKLETMALLYRLSGDYNPLHSDPMVAKVAGFSQPILHGLCTLGFAVRAIIKCICRGDPDLIKSV

SEQ ID NO: 12127 - protein, 255 aa, Triticum aestivum
MRKKLGTRFPAARIKKIMQADEDVGKIALAVPVLVSRALELFLQDLIDHSYKITLQSGAKTLNSFHLKQCVKRYSSFDFLTEIVNKVPDLGGGESCGDERGLPRRRKFSNGSDPENEEPRSSKMPIRSLNTSPRGRGRGRGRGRGRPPTKRKEIGYVQFEDESSMFAEQSEPLPGDEIVPETNRGNESIPQSSHPLVEAPSAMTPAVISKVEEASTNHQPDWPMPDAIGGIGVGPSSFGHLTVQVDEVEDYDNED

SEQ ID NO: 12128 - protein, 365 aa, Mycosphaerella graminicola
MPTYNIVVFGGDHCGPEVTAEALKVLDVIDNSNADVHFNIQPHLLGGASIDAHGEPLTDEALAAAKAADAVILGAIGGPKWGTGKVRPEQGILRLRKEMGTYGNLRPCFFASESLVKTSPLKEEVCRGVNFNIVRELTGGIYFGERTEDDGSGYAVDTEPYSRAEIERVARLAGFLALAEDPPCPVWSLDKANVMATSRLWRKTVTDVFANEFPQLKIGHHLIDSAAMLMVKNPRALNGVIVTSNLFGDIISDEASVIPGSLGLLPSASLTASPDGKSKCNGIYEPIHGSAPDISGKGIVNPVAMILSLGMMCKYSLQQPELAKKIDEAVRNVIEKGINTADIGGSAKTAEVGDAIAKELEALLK

SEQ ID NO: 12129 - protein, 365 aa, Fragaria x ananassa
MGSTGETQMTPTHVSDEEANLFAMQLASASVLPMVLKAAIELDLLEIMAKAGPGSFLSPSDLASQLPTKNPEAPVMLDRMLRLLASYSILTCSLRTLPDGKVERLYCLGPVCKFLTKNEDGVSIAALCLMNQDKVLVESWYHLKDAVLDGGIPFNKAYGMTAFDYHGTDPRFNKVFNKGMADHSTITMKKILETYKGFEGLKSIVDVGGGTGAVVNMIVSKYPSIKGINFDLPHVIEDAPQYPGVQHVGGDMFVSVPKGNAIFMKWICHDWSDEHCIKFLKNCYAALPDDGKVILAECILPVAPDTSLATKGVVHMDVIMLAHNPGGKERTEQEFEALAKGSGFQGIRVCCDAFNTYVIEFLKKI

SEQ ID NO: 12130 - protein, 483 aa, Burkholderia fungorum LB400
METETDLRRHDLLIDGKRLPPGTGEYSVDIDPATEEPIALVAQGSAADVDAAVHAARAALKVWNAIRSAERGRILMRLAGLMRANLEELAALESLDAGKPIAAVMRQDIPAAIDTLEYYAGWCDKINGQVVPVRPDALTYTLREPVGVVAAIVPWNFPLMIGMWKIAPALACGCTLIVKPAEITPLSALRIGELALEAGVPPGVLNIVTGKGRVVGDALVAHPGVDKVTFTGSPSVGRGILQGAAGNFKRVTLELGGKSANLIFPDANLDNAVRAAAAGIFFNTGQVCSAGSRILAHRDVYDEVVERLAARARSIKVGDPSSRETSMGPLISAAQMKTVLGYVETGRAEGASLVTGGARVGERGFFVEPTVFADVEHEMRISQEEIFGPVVSVIRFDDEADAIRIANGTLYSLAAGVWSADIGRVHRVARDLRAGTVWINTYGYTDVRLPWGGSGDSGFGREHGDVAIENFTEPKAVWLAIDQ

SEQ ID NO: 12131 - protein, 211 aa, Brassica napus
  misc_feature (202)..(202): Xaa can be any naturally occurring amino acid
MERGGFHGYGKFSLNTTNPSDPAKLLMAESGMQLPEPNQPTKTANGGQEECTVREQDRFMPIANVIRIMRRILPAHAKISDDSKETIQECVSEYISFVTGEANERCQREQRKTITAEDVLWAMSKLGFDDYIEPLTLYLHRYRELEGDRGVNCGVGSVSMTNGMVLKRPNGTMAEYGPYGTMAPYRYHHQNGFAYSGNDPNXKMGGSSSSF

SEQ ID NO: 12132 - protein, 377 aa, Candida albicans
MSADGEFTRTQIFGTVFEITNRYTELNPVGMGAFGLVCSAVDRLTGQNVAVKKVMKPFSTSVLAKRTYRELKLLKHLKHENLITLDDIFISPLEDIYFVNELQGTDLHRLLNSRPLEKQFIQYFTYQIMRGLKYIHSAGVIHRDLKPSNILINENCDLKICDFGLARLQDPQMTGYVSTRYYRAPEIMLTWQKYDTEVDLWSVGCILAEMIEGKPLFPGKDHVHQFSIITELLGSPPADVIDTICSENTLRFVQSLPHRDPIPFSERFASCTHVEPEAIDLLAKLLVFDPKKRISAVQGLTHPYMEAYHDPTDEPVCESKFDWSFNDADLPVDTWRVMMYSEILDFHQTVGVANETEGSEQPDSQVEQNNLDSANGA

SEQ ID NO: 12133 - protein, 454 aa, Rubrobacter xylanophilus DSM 9941
MSAFDLIVRGGTVVRGGCEVADVGVADGVISAVGPDLEGGAREEIDARGLLVLPGAIDAHVHFNEPGRTRWEGFASGTRALAAGGTTLCVEMPLNAHPPTTDGESFDLKLAAAKASAHVDFALWGGIVPGRVGRMEELAGRGVAGFKAFMSATGTPDFEAADDLTLYEGMQEAARLGLPVLVHAENRQITDALARRATSALRTTMRDYLASRPAVAELEAIGRAILLASEAGCSLHIVHVSTGRGVALVAAARERGVDVTCETCPHYLLFTDEDAVRIGAAAKCAPPLRPREEVESLWEQVLAGNVAFVTSDHSPCPPDMKAGEDMFRAWGGISGCQSLLPALLDEGYHGRGLPPERLAELLSANVARRFGFAGKGGIEEGNDADLALVDPSGEHVLREEDLHYRHPISPYVGRSFRGRVVRTILRGRTVFEGGRVVSGPAGRFVRPQREKGER

SEQ ID NO: 12134 - protein, 403 aa, Mycobacterium avium subsp. paratuberculosis str. k10
MKRVSELLESIQSRAEQGAITDAEIFAAHVGGKLSVSLTSPLDTQRALSIAYTPGVAQVSRAIAADHRQAAHYTWANRLVAVVSDGSAVLGLGDIGPAASLPVMEGKCALFQAYGGLNAIPIVLDTKDPDEIVETLVRLRPTFGAVNLEDISAPRCFEIERRLIEALDCPVMHDDQHGTAIVVLAALMGASKLLGRDMSSLKVVVSGAGAAGVACTNLLMAMGVSDITVLDSRGILHAGRDDMNDVKAALSRRTNPAGLTGSLAEAIRGADVFLGLSGGVVPEEMIAAMAPNGIVFALSNPDPEIHPQIAAKYATVVATGRSDFPNQINNVLAFPGVFRGALEAGARRITEKMMVAAAEAIFSVVSDDLAPDRIVPSPLDTRVGDAVATAVALATEVSDAPAG

SEQ ID NO: 12135 - protein, 158 aa, Escherichia coli K12
MKLISNDLRDGDKLPHRHVFNGMGYDGDNISPHLAWDDVPAGTKSFVVTCYDPDAPTGSGWWHWVVVNLPADTRVLPQGFGSGLVAMPDGVLQTRTDFGKTGYDGAAPPKGETHRYIFTVHALDIERIDVDEGASGAMVGFNVHFHSLASASITAMFS

SEQ ID NO: 12136 - protein, 458 aa, Burkholderia cepacia R18194
MTEETMASVISASKVDADAAVAAARRAFDHGPWPRMSLHQRMEVMARLRELLIEHESLIAHLVTEEMGCPISISRWMQAGGPISMLGMFLEVAPHYPFSQIRRTVTGNGLVLREPLGVVAAVVPWNAPLQIAVLKLAPALLAGNTAILKPAPETPLDACLLAELAEKAGLPKGVLNVLPADREVSEYLCLHPAVDKVSFTGSSAAGQRLGALCGNDIKRITLELGGKSPAIVLDDADIGKAVESLRMGSLRNSGQVCSNKTRLLVSKHRKDELIDAFVEMVRSMPVGDPFDPLTQIGPLVSARQRDRVEGYIAKGKQEARLVLGGGRPKGLTRGWFVEPTIFADVDPDAVIAQEEIFGPVISILSFDTDDDAVAIANNSAYGLHGAVFSADTERAVNVARRVRTGAIDINGASAGYHSPLGGRKKSGIGREAGIEGFDGYVEIKSIGIPVSYAEQLSS

SEQ ID NO: 12137 - protein, 117 aa, Spinacia oleracea
MASSAVIKLACAVLLCIVVAAPYAEAGITCGMVSSKLAPCIGYLKGGPLGGGCCGGIKALNAAAATTPDRKTACNCLKSAANAIKGINYGKAAGLPGMCGVHIPYAISPSTNCNAVH

SEQ ID NO: 12138 - protein, 500 aa, Schizosaccharomyces pombe
MTIDLNVIQSDIISARRAPENSLFIDGKFVSPIEPAAKPIPLINPATEEIIGTCANASAKDVDSAVENAYNTFRSGIWAKWPGKQRGLVLRKIAKMMREKRELLAGIDTINCGKPTPYALFDIDSCADMFEYYAEVAETDNPTVKVPLPNNPGFCAFEKRFPRGVIGVITPWNFPLKMALWKLVPAIASGNCVVLKPSELAPWSCLEFALICKEAGLPDGVLNVIIGSGKESGAALSCHPKIAYLAFTGSLATGKKIMHAAAENIVPLTLELGGKSPLIICEDADLSLAIPSAAFAIFFNQGEACTAASRLIVHESVADEVLGGLVSEANKLIIGNGLDPQVTLGPVVSKTQFEKIVSYIQSAINEGCKCVVGGLPRSEQKGYFIPPTVFTNVQTHNKIWREEIFGPVLAVKTFHTNEEALELANDSEYGLGSGVFSTNPKTLEFFSNNIEAGMCSLNNYHVVTHELPWIGWKHSGLGVGLSKHGYNEYMRLKQITQYVG

SEQ ID NO: 12139 - protein, 103 aa, Zea mays
  misc_feature (70)..(70): Xaa can be any naturally occurring amino acid
  misc_feature (77)..(77): Xaa can be any naturally occurring amino acid
  misc_feature (83)..(83): Xaa can be any naturally occurring amino acid
  misc_feature (95)..(95): Xaa can be any naturally occurring amino acid
  misc_feature (99)..(99): Xaa can be any naturally occurring amino acid
  misc_feature (101)..(101): Xaa can be any naturally occurring amino acid
MMLAYMDRRCFADVPGGALWEEVLHWAVDNHGLAPASWTDYLRLTVGGTLSNGGVSGQSFRYGPQVSNVXELEVVTXDGERRXCSPSSHPDLFFXVVGXLXQF

SEQ ID NO: 12140 - protein, 499 aa, Glycyrrhiza echinata
MDILSLLSYSVFYLALFFIFNIVIRARKFKNLPPGPPSLPIIGNLHHLKRPLHRTFKGLSEKYGHVISLWFGSRLVVVVSSASEFQQCFTKNDVVLANRPRFLSGKYIFYNYTTLGSTSYGEHWRNLRRITALDVLSNHRINSFSGIRRDETQRLITRLADDSSTNFAEIELSYRFYDMTFNNIMRMISGKRYYGEDCDMSDLQEASQFRDMVSELLQLSGANNKTDFMPLLRFLDFENLEKRLKDISGKTDAFLRGLIQEHRAKKERANTMIDHLLNLQDSQPEYYTDQIIKGLALAMLLAGTDSSAVTLEWSMSNLLNHPEVLKKVKDELDTHVGQDRLVDESDLPKLSYLKNVINETLRLYTPAPLLLPHSTSDECNIGGYKVPQDTIVLINAWAIHRDPELWTEATTFKPERFEKKGELEKLIAFGMGRRACPGEGLAIRAISMTLALLIQCFDWKLTNGDKIDMAERDGFTLTKLVPLKAMCKSRPVINKVFKQ

SEQ ID NO: 12141 - protein, 159 aa, Triticum aestivum
MAGMVFGLETPMMTALQHLLDIPDGEAGAAAGEKQGPTRAYVRDARAMAATPADVKELPGAYAFVVDMPGLGSGDIKVQVEDERVLVISGERRREEKEDAKYLRMERRMGKLMRKFVLPENADMEKISAACRDGVLTVTVDKLPPPEPKKPKTIQVQVA

SEQ ID NO: 12142 - protein, 359 aa, Haemophilus somnus 2336
  misc_feature (7)..(7): Xaa can be any naturally occurring amino acid
MLPVTEXIGGYFMKINTLSCVVKGAKSVDVISQEIEFDEQSQDQTLIQITRGSICGSDLHYYEHGKVGNFAIKHPMILGHEIIGKIVKTNAPNLFEGQKVAINPSKPCLSCAYCLSGYSNQCETMRFFGSAMYNPHVDGGFTQYKIVDNNQCIPYSQEVSDEVMVFAEPLAVTIHAAKQGGDLQGKKVFISGVGPIGCLAVAAVKALGAAEIICSDISQRCLDLALEMGATKVLHATEGNFSEYLQNKGEFDVSFEASGHISSIERCLAVTKAKGTIVQIGMGGSIPQFNMMPLISKEINWKGSFRFVEEFNTAVKWLSLGKINPLPLLSEIYPFEQLETALQRAGNKNEISKIQLNFA

SEQ ID NO: 12143 - protein, 497 aa, Pseudomonas putida KT2440
MLSELPILPATRAFLERKLKMRIGADWQDAASGRTLSFRNPATGEVLGEVPAAEAEDVDRAVRAARQAFDDSPWSRMRPRERQNLLWRLADLMERDARQLAELECLNNGKSAAVAQMMDVQLAIDFLRYMAGWATKIEGSTVEASMPLMPNDQFHGFVRREAVGVVGAIVAWNFPLLLACWKLGPALATGCTVVLKPADETPLSVLKLAELVDEAGYPAGVFNVVTGTGLNAGAALSRHPGVDKLTFTGSTEVGKLIGKAAMDNMTRVTLELGGKSPTIVMPDANLQEAAAGAATAIFFNQGQVCCAGSRLYVHRKHFDNVVADIAGIANAMKLGNGLDPAVQMGPLISAKQQDRVTGYIELGRELGATIACGGEGFGPGYFVKPTVIVDVDQRHRLVQEEIFGPVLVAMPFDDIDEVIGMANDNPYGLGASIWSNDLAAVHRMIPRIKSGSVWVNCHSALDPALPFGGYKMSGVGREMGSAAIEHYTELKSVLIKL

SEQ ID NO: 12144 - protein, 434 aa, Escherichia coli
MKTRTQQIEELQKEWTQPRWEGITRPYSAEDVVKLRGSVNPECTLAQLGAAKMWRLLHGESKKGYINSLGALTGGQALQQAKAGIEAVYLSGWQVAADANWRPACIRISRSIRQTRCPAVVERINNTFRRADQIQWSAGIEPGDPRYVDYFLPIVADAEAGFGGVLNAFELMKAMIEAGAAAVHFEDQLASVKKCGHMGGKVLVPTQEAIQKLVPARLAADVTGVPTLLVARTDADAADLITSDCDPYDSEFITGERTSEGFFRTHAGIEQAISRGLAYAPYADLVWCETSTPDLELARRFAQAIHAKYPGKLLAYNCSPSFNWQKNLDDKTIASFQEQLSDMGYKFQFITLAGIHSMWFNMFDLANAYAQGEGMKHYVEKVQQPEFAAAKDGYTFVSHQQEVGTGYFDKVTTIIQGGTSSVTALTGSTEESQF

SEQ ID NO: 12145 - protein, 507 aa, Bordetella parapertussis 12822
MTTVHSATPEETRRLLQQLGVDPARYDGGTLEVRSPIDGQAIARLPELTAEQARARVADARQAFLAWRKVPAPRRGELVRLLGEELRAAKAELGRLVSIETGKILSEGEVQEMIDICDFATGLSRQLYGLTIATERAEHRMMETWHPAGPVAIISAFNFPVAVWAWNAAIALVCGDSLLWKPSEKAPLTALATQALLERALARFGDAPAHLSQVLIGGREVGEALVDDPRIPIVSATGSTAMGRKVGPKVAERFGRSILELGGNNAAIICPSANLDLALCGIAFSAMGTAGQRCTSLRRIFVHEQIADDLVARLQQVYESVAIGDPRDSGTLIGPLRDQAAFDAMQRSLADARAAGGRVTGGAREPVGGHDQAYYARPALVEMPAQSEVVERETFAPILYVMRYRDLDEAIALQNDVPQGLSSSIFTNDLREAERFVSAEGSDCGIANVNIGPSGAEIGGAFGGEKETGGGREAGSDSWKAYMRRTTNTVNYGNALPLAQGVKFDVA

SEQ ID NO: 12146 - protein, 299 aa, Glycine max
  misc_feature (227)..(227): Xaa can be any naturally occurring amino acid
MCGILAVLGCVDNSQTKRARIIELSRRLRHRGPDWSGIHCYEDCYLAHQRLAIVDPTSGDQPLYNEDKTVIVTVNGEIYNHKQLRQKLSSHQFRTGSDCEVIAHLYEEHGEEFVNMLDGMFAFILLDTRDKSFIAARDAIGITPLYLGWGHDGSTWFASEMKALSDDCERFISFPPGHIYSSKQGGLRRWYNPPWFSEDIPSTPYDPTLLRETFERAVVKRMMTDVXPFGVLLSGGLDSSLVAAVVNRYLAESESARQWGSQLHTFCIGLKGSPDLKAAKEVADYLGTRHHELYFTVQE

SEQ ID NO: 12147 - protein, 224 aa, Listeria monocytogenes str. 4b F2365
MINQKKIAGEKACEWIKDGMVVGLGTGSTVYYTIEKLGEMVNNGLHITGVATSEETSKQAQNLGIPLKSLNDVAEIDITIDGADEIDTDFQGIKGGGGALLREKMVASASLKNIWVVSEEKLVRNLGKFPLPIEVIPFGWKQIERTLEKEHIQTILRRQSSGEIYVTNNGNYILDIVNQTFRDAEMWQEKLAQIPGIVEHGLFLHYVDIIVCAKANGEIELIKK

SEQ ID NO: 12148 - protein, 383 aa, Nostoc sp. PCC 7120
MAKHLGKKIAPIPMSTDISVVDLIDNYFTAYNSARLREASQLLACDILKDGVTVGVSLSGAMTPAGFGVSALAPLIRNGFIDWMISTGANLYHDMHYGLGFELFAGNPFLDDVKLREEGTIRIYDIIFGYDVLLETDAFIRKILQAEPFQKRMGTAEFHYLLGKYVREVEKQLGVKHSCLLATAYEYGVPIYTSSPGDSSIGMNVAALALEGSQLILDPAIDVNETAAIAYNAREGEGKSAAVILGGGSPKNFLLQTQPQIHEVLGLEERGHDFFVQFTDARPDTGGLSGATPAEAVSWGKIDPDELPSTIVCYTDSTIALPLVTAYVLNQCPPRPLKRLYDRREELYDKLRTDYLAAKDKPVEKVATNGEVATYPCGTPIRQ

SEQ ID NO: 12149 - protein, 250 aa, Zea mays
MAKNYPTVSAEYSEAVEKARRKLRALIAEKSCAPLMLRLAWHSAGTFDVSSRTGGPFGTMKHQSELAHGANAGLDIAVRLLEPIKEEFPILSYADFYQLAGVVAVEVTGGPEIPFHPGREDKPQPPPEGRLPDATKGSDHLRQVFGKQMGLSDQDIVALSGGHTLGRCHKERSGFEGAWTTNPLVFDNSYFKELLSGDKEGLLQLPSDKALLSDPVFRPLVEKYAADEKAFFDDYKEAHLKLSELGFADA

SEQ ID NO: 12150 - protein, 438 aa, Desulfovibrio desulfuricans G20
MALFTKEEALHYHEAPRHGKVEVIPVKPCRNQKDLSMAYSPGVAEACKAIKEDPSKAEIYTGRSNLVAVVSDGTAVLGLGNIGPLAGKPVMEGKGVLFKTFADIDVFDINLDVSSADQLIGVVKALEPTFGGINLEDIKAPECFYIEDTLKKEMNIPVFHDDQHGTAVISGAGLLNALEITNRKAENMKVVVVGAGAAGIACAKFYVSLGVDPANIYMFDSRGLIHKGRKDLNEYKALFAQPSDAGTLAEVMKGADMFLGLSTKNLVSQDMVRSMAKDPVLFAMANPDPEITYPDAKQASPNCIMGTGRSDFPNQVNNVSGFPYIFRGALDVGATEINEEMKVAAARSLAALAKEPVPSEICDMYGVKELTFGVDYVIPKPLDPRVLVWETPAVAKAAMDSGVARKPIADMEAYKKQLTTRFDESRKRIARVVDSYGL

SEQ ID NO: 12151 - protein, 168 aa, Sorghum bicolor
MAAASSATSVHDFTVKDASGKDVDLSTYKGKVLLIVNVASQCGLTNSNYTELAQLYEKYKDQGFEILAFPCNQFGGQEPGTNEEIVQFACTRFKAEYPIFDKVDVNGNNAAPIYKFLKSSKGGLFGDSIKWNFSKFLVDKEGRVVDRYAPTTSPLSIEKDIKKLLGSS

SEQ ID NO: 12152 - protein, 327 aa, Triticum aestivum
  misc_feature (181)..(181): Xaa can be any naturally occurring amino acid
MASTTAAVPEVALRSGGARPMPAIGMGTATFPVVPETTVKAVLEAVEVGYRHFDTAAMYATERPLGEALAEAVRRGLLASREEVFVTSKLWCTQCHPHLVLPSLRESLQNLQMEYVDLYLIHWPISLKPGPTVFPVKREDAVPFDFEGVWRAMEECHRLGLAKAIGVSNFTTSHLDKLLAXATVHPAVNQVELNPVWQQRKLREYCAEKGIHVAAYSPLGGQNWSGDGNAVLDSEVLAEIAKARGKTVAQVALRWIYEQGVTPIVKSFSKERLKENLGIFDWGLTDDDLRKIGQIPQKKIVKAETVLFSAEGEFTSADLADMEIVED

SEQ ID NO: 12153 - protein, 354 aa, Zea mays
  misc_feature (194)..(194): Xaa can be any naturally occurring amino acid
MDLASFITSVLTSFLIFVALVLLFTWLSRRPGNAPVYYPNLLLRGLDPWAGRGRGTRSPVGWLRDAISASEPDVVAAGGVDAAVYLVFLSSVLSILVYSGIVLLPVLLPVAATGGALSTIPIPTNKSAQSAQNFSSIERLGMGNVAEKSMRLWAFLLSVYWVSFVTYFVLWKSYKHVSNLRATARSAPDVKPEXFAVLVRDIPRPSPDETIKDSVDSYFRALHPNTFYRSMVVTDHTKADKIYREIEGHKRKIARAEVIYANSKTESNTEGTRPTHRTGFLGLIGTKVDTIEYCSEQIKELLPKLEAEQKTTLHEKQQRAAIVVFNSRSAAAFASQTLHAQVYDKWDSYGKLLN

SEQ ID NO: 12154 - protein, 206 aa, Paracoccidioides brasiliensis
RRLPRQLLPLFRPSILPNHAVRTFACSCSRMGSPLPPVTPPVSTAHASDSFQLLSSAEKTGPAEDALFNEQVKAVTEWWNTPRYEGIRRPYSAEAVVSKRGSLQQTYPSSIMARKLFNLLNERAKTGKPVHTLGAIDPVQMTQQAPNQEVLYISGWACSSLLTTTNEVSPDFGDYPYNTVPNQVQRLFKAQQMHDSKQWDSRRKLS

SEQ ID NO: 12155 - protein, 95 aa, Zea mays
HASAHASAHASAHASALSSASPLARLISRRGLAGAADGHGSAKVPLWKDPLSPSKWKEEHFVLASLSMWGVIFYGGYKLFSGKKEAKTEAASPQA

SEQ ID NO: 12156 - protein, 225 aa, Paracoccidioides brasiliensis
YWAEVQAVKEWWQDSRWRYTKRPFTAEQIVAKRGNLKIEYPSNVQSKKLWGILEERFKNKTASFTYGCLEPTMLTQMVKYLDTVYVSGWQSSSTASSTDEPSPDLADYPMNTVPNKVNQLWMAQLFHDRKQREERLRAPKSQRASLPNIDYLRPIIADADTGHGGLTAVMKLTKLFIERGAAGIHIEDQAPGTKKCGHMAGKVLVPISEHINRLVAIRAQADIMG

SEQ ID NO: 12157 - protein, 305 aa, Sulfolobus shibatae
MPLDPRIKKLLESGFVVPIGKASVDEVRKIFRQLASAAPKAEVRKVEDIKIPGSETSINARVYFPKAKGPYGVLVYLHGGGFVIGDVESYDPLCRAITNACNCVVVSVDYRLAPEYKFPSAVIDSFDATNWIYNNLDKFDGEMGIAIAGDSAGGNLAAVVALLSKGKLDLKYQILIYPAVGFDSVSRSMIEYSDGFFLTREHIEWFGSQYLRSPADLLDFRFSPIIAQDLSGLPPALIITAEYDPLRDQGEAYANRLLQAGVPVTSVRFNNVIHGFLSFFPLIDQGKDAIGLIGSVLRRTFYDKS

SEQ ID NO: 12158 - protein, 159 aa, Glycine max
MSDAPASPSHESGGEQSPRGSLSGAAREQDRYLPIANISRIMKKALPPNGKIAKDAKDTMQECVSEFISFITSEASEKCQKEKRKTINGDDLLWAMATLGFEDYIEPLKVYLARYREAEGDTKGSARSGDGSARPDQVGLAGQNAQVQPQSGYAFNARP

SEQ ID NO: 12159 - protein, 415 aa, Arabidopsis thaliana
MEQLWLFENEDRISELHEALLVHIMSSLPTKTVVATSVLSKRWRHVWKTVQNLKFVSKYHQTFSEDVYRFFMLHKAPFLESLDLEFSNQLDASDLGILVGIAFARHVRNLVLDLDYYSNFSQLCAARFPSGLCIYDNNKTLETLTLKHSILLYFPYRVCLKSLRKLHLYKVHFYGKDSVYNLLCGCPSLRDLIVHRYRECMETFTIAVPSLERLTIEDSGFGYGCCYVINAPSLKYLNIRRFKYLNSCLIEKAPELAEAKVSDVSDIENENILESLTSAKRLSIHLSPLEWWNLLTFMLEASPKLQILKLTDLNMSSTKGNQIGQKWIQPKCVPECLLFHLETFVWTGYEWQRRDEKEVARYILRNTTSLKKATFSTKPIEPVKLKVFKKRREILNELASLGRASNPSDFVFESI

SEQ ID NO: 12160 - protein, 217 aa, Triticum aestivum
PGPEGLEFHKAHGMTMYEYTKTDARLNRVFNEAMKSYTTIVTGKLVELYTGFEDVATLVDVGGGVGATIRAVTSKYPHIKGINFDLPHVIAEAPQSPGVEHVAGDMFKNVPSGDAIVLKWILHNWTDEHCTTLLRNCYNALPAHGKVVVVEGILPVEPEATSRGQQASLSDMIMLTHTAGGKERNQREFEQLAKAAGFTGVKTAYIYSNTWVIELTK

SEQ ID NO: 12161 - protein, 264 aa, Haloarcula marismortui ATCC 43049
MVGVGTWDIDGDTVQKSVRAGLNVGYAHVDTAEGYKNESEIGEALADYDREDVFLTSKVLPKHLDYESVIEACEASLDRLGTDYLDLYLVHWPNPATSIRETMNAMATLHDQGKIRNVGVSNFSAYQLGAAQHVADVPIAVNQIEYHPWNTQDQVVEFCRDTDTVVEAAAPLGRTKVFADDIIQDLSEKYDRSPAQIVLKWAVENNVVVLPKSSSPEHVRQNFDLFDWELDATDRERIDAIEREQAVYDTGINDWDNDTYGISQ

SEQ ID NO: 12162 - protein, 302 aa, Synechocystis sp. PCC 6803
MGEEPVPADKALGKKFKKKNASWSIEESEALYRVEAWGAPYFAINAAGNITVSPNGDRGGSLDLLELVEALRQRKLGLPLLIRFSDILADRLERLNSCFAKAIARYNYPNTYQAVYPVKCNQQRHLVEALVRFGQTSQCGLEAGSKPELMIALATLPPPLDRQDKHTKPLIICNGYKDQDYLETALLAKRLGHRPIIIIEQLRELEWVLHISQQLNIKPMLGVRARLSCQSLKSSEISSGNGDRAKLGLTMPDIVTVIHRLEENNCLDCLKMLHFHLGTQVSDIALIKEAMREASQLYVELV

SEQ ID NO: 12163 - protein, 537 aa, Glycine max
MAALNLCRMALRSSKLLSRPYHRLSVQLQMQMQPSSPPLTRKMSMDAQSVASQLNSSGLLRTQGLIGGKWSDAYDGKTIKVYNPATGESIVDVACMGGRETNDAISAAYDAYGSWSKTTAAERSKLLRKWYDLLMVHKEELAQLITLEQGKPLKESVGEIVYGAGFIEFAAEEAKRIYGDIVPAPFSDRRLFVLKQPVGVVGAITPWNFPLAMITRKVGPALACGCTVVIKPSELTPLTALAAVELSIQAGIPPGVVNVVMGNAPDIGDALLASPQVRKITFTGSTAVGKKLMAGSAETVKKVSLELGGNAPCIVFDDADLDVAVKGTLAAKFRNSGQTCVCANRIIVQEGIYEKFANALRDAVQNMKVGDGFSEGVSQGPLINEAAVKKVESLIHDATSKGAKVILGGKRHSLGLTFYEPTVISDVNSDMHISREEAFGPVAPLLRFKTEEEAIRIANDTNAGLGSYVFTNSIQRSWRVAEALEYGLVGVNEGVISTEVAPFGGFKQSGLGREGSKYGMDEYLEIKYVCFGNMNKE

SEQ ID NO: 12164 - protein, 234 aa, Deinococcus radiodurans
MEFFIDTAIVDEIREINAWGVLSGVTTNPSLIVASGRDFKEVIGEIAELVPGGAISAEVTALDAEGMIKEGKDVAAWHKQVVVKLPLTPAGLQACKALTSEGIKTNVTLCFSVPQALLAARAGATYVSPFVGRVDDTGWDGSELIRQIKEAFVLGDIQTKVLAASIRHPQHVVQAALAGADVATIPYKVFTQMVKHPLTQAGLDSFMADWAKRQGASPETPPSEAGTNPVKKEG

SEQ ID NO: 12165 - protein, 316 aa, Methylomonas aminofaciens
MANLFDQLKEFTTIVADTGDVEAIKSVKPYDATTNPSLLLKASTLPQYAPLIDEAIAYAKSQSGDKAQQIEDAADKLAVLIGQEILKHIPGKISTEVDARLSFDTDAMVQKGRKLIKLYADAGISKDRVLIKLASTWEGIKAGEILEKEGINCNLTLLFSFAQARACAEAGVFLISPFVGRILDWYKAKTGENYTSETDPGVLSVRKIYAYYKEHGYKTVVMGASFRNTGEITALAGCDRLTVSPNLLERAEGYRRYLPRVLVDNGATKQRPALLTEKEFRFDQNEDAMATEKLAEGIRGFVVDQNKLEKALAEKL

SEQ ID NO: 12166 - protein, 284 aa, Glycine max
MGVFSENPNPDPVVIRQVWASNLESEFQLIRELIDHYPFISMDTEFPGVVFRPHLDPTKPYNHRNNNRNRHSDHYRLLKSNVDALNLIQVGLTLTDAAGNLPDLAGNRSIWEFNFRDFDVARDAYALDSIDLLRRQGIDFARNATDGVESTRFAELMMSSGLVCNDSVSWVTFHSAYDFGYLVKILTRRNLPTRLEEFLKTVKVFFGDNVYDVKHMMRFCDTLYGGLDRVARTLNVERAVGKCHQAGSDSLLTWHAFQKIVDIYFVKDEHRKHAGVLYGLEVFC

SEQ ID NO: 12167 - protein, 392 aa, Corynebacterium glutamicum ATCC 13032
MTIDLQRSTQNLTHEEIFEAHEGGKLSISSTRPLRDMRDLSLAYTPGVAQVCEAIKEDPEVARTHTGIGNTVAVISDGTAVLGLGDIGPQASLPVMEGKAQLFSSFAGLKAIPIVLDVHDVDALVETIAAIAPSFGAINLEDISAPRCFEVERRLIERLDIPVMHDDQHGTAVVILAALRNSLKLLDRKIEDLKIVISGAGAAGVAAVDMLTNAGATDIVVLDSRGIIHDSREDLSPVKAALAEKTNPRGISGGINEAFTGADLFIGVSGGNIGEDALKLMAPEPILFTLANPTPEIDPELSQKYGAIVATGRSDLPNQINNVLAFPGIFAGALAAKAKKITPEMKLAAAEAIADIAAEDLEVGRIVPTALDPRVAPAVKAAVQAVAEAQNA

SEQ ID NO: 12168 - protein, 159 aa, Listeria monocytogenes str. 4b F2365
MNVHDFSEKAMNGKEIALSDYKGKVLLIVNTASKCGLTPQLEGLEAMYKKLGGANFEILGFPCNQFLRQDPGSDEEILEFCQMNYGVTFQMFSKIKVKGKDASPLYKYLTEQTGGKKVEWNFAKFLIDENGEVVERFPSKMKPADFEDKVEALVAKVNN

SEQ ID NO: 12169 - protein, 407 aa, Pseudomonas aeruginosa PAO1
MIGFEIFLAIGMFTAIVLGLVAIILVARAKLVSSGDVTIQINGEHSLTVPAGGKLLQTLAANNVFLSSACGGGGTCAQCKCVVVEGGGEMLPTEESHFTRRQAKEGWRLSCQTPVKQDMQIRVPEEVFGVKKWECTVESNPNVATFIKELTLRLPDGESVDFRAGGYVQLECPPHVVEYKDFDIQPEYRGDWDKFNMWRYVSKVDETVIRAYSMANYPEEKGVVKFNIRIASPPPGSDLPPGQMSSWVFNLKPGDKVTVYGPFGEFFAKDTEAEMVFIGGGAGMAPMRSHIFDQLRRLKSNRKISFWYGARSLREAFYTEEYDQLQAENPNFQWHLALSDPQPEDNWTGLTGFIHNVLFENYLKDHPAPEDCEFYMCGPPMMNAAVIKMLTDLGVERENILLDDFGG

SEQ ID NO: 12170 - protein, 618 aa, Zea mays
MDSDYGVPRELSEVQKKRALYQPEVPPCLQGTTVRVEYGDAAIAADQAGAHVISHAFPHTYGQPLAHFLRKTAVVLDAKVISEHPVVRVGIVFCGRQSPGGHNVVWGLYEAIKAHNQNSKLIGFLGGSDGLLAQRTLEITNEVLASYKNQGGYDMLGRTKDQIRTTEQVNGAMASCQALKLDALVIIGGVTSNTDAAQLAETFAEAKCATKVVGVPVTLDGDLKNQFVETTVGFDTICKVNAQLISNVCTDALSAEKYYYFIRLMGRKASHVALECALQSHPNMVILGEEVAASKLTIFDITKQICDAVQARAEKDKNHGVILIPEGLVESIPELYALLQEIHGLHGKGVSVENISSQLSPWASALFEFLPPFIRKQLLLHPESDDSAQLSQIETEKLLAQLVETEMNRRLKEGTYKGKKFNAICHFFGYQARGALPSKFDCDYAYVLGHVCYHIIAAGLNGYMATVTNVKSPVNKWRCGAAPISSMMTVQRWSRGPSATQIGKPAVHMASVDLKGKAYDVLRQNSSSFLLEDVYRNPGPLQFEGPGADSKPISLCVEDQDYMGRIKKLQEYLEKVKRIVKPGCSQDVLKAALSAMSSVTETLNIMTSSSTGQTPLSH

SEQ ID NO: 12171 - protein, 441 aa, Lotus corniculatus var. japonicus
MNQPKIKRRVGKYEVGRTIGEGTFAKVKFARNSETGEAVALKILDKEKVLKHKMAEQIKREVATMKLIKHPNVVQLYEVLGSKTKIYMVLEFVTGGELFDKIVNHGRMCEDEARRYFQQLINTVDYCHSRGVYHRDLKPENLLLDACGNLKVSDFGLSALSQQIKDDGLLHTTCGTPNYVAPEVLNDKGYDGATADLWSCGVILFVLVAGYLPFDDPNLMELYKKISAAEFTCPPWLSFSARKLITRILDPNPMTRITIAEILEDEWFKKDYKPPIFQENGETNLDDVEAVFKDSEEHHVTEKKEEQPTAMNAFELISMSKGLNLENLFDVEQGFKRETRFTSKSPANEIISKIEEAAKPLGFDVQKKNYKMRLANVKAGRKGNLNVATEVFQVAPSLHMVEVRKAKGDTLEFHKFYKKLSTCLEDVVWKTEDDMQKQEAK

SEQ ID NO: 12172 - protein, 212 aa, Oryza sativa (japonica cultivar-group)
MRTGEVAEAVPRVVAILSSLLQRVAERNDAAAAAAAVGEEAAAVSAFQGLTKPAISIGGYLERIFRFANCSPSCYVVAYIYLDRFLRRRPALAVDSFNVHRLLITSVLTAVKFVDDICYNNAYFARVGGISLMEMNYLEVDFLFGIAFDLNVTPAAFASYCAVLQSEMTYLEQPPAVDLPRLHCCPSDQDDAGCHHKQQQQQQQQQQHQLAV

SEQ ID NO: 12173 - protein, 467 aa, Glycine max
  misc_feature (90)..(90): Xaa can be any naturally occurring amino acid
  misc_feature (213)..(213): Xaa can be any naturally occurring amino acid
MEQKGGVLMQRYELGRLLGQGTFAKVYHARNIITGMSVAIKIIDKEKILKVGMIDQIKREISVMRLIGHPHVVELYEVMASKTKIYFVMXHEKGGELFNKVFKGKLKEDDARKYFQQLISAVDYCHSSGVCHRDLKPENLLLDENENLKVTDLGLSALAESKCQDGLLHTTCGTPAYVAPEVINRRGYDGIKADIWSCGVILYVLLAGHLPFXNTNLMEMYRKIGRGEFKFPKWFAPDVRRFLSKILDPNPKARISMAKIMESSWFKKGLEKPTITQNEDEELAPLDADGVFGACENGDPIEPAKNSKPCNNLNAFDIISYSSGFDLSGLFEETDRKKEERFTSDKPASIIISKLEEICRRLRLKVKKKDGGLFKLEGSKEGRKGPLGIDAEIFEITPVFHLVELKKSSGDTLEYQKLLKQEVRPALKDIVWNWQGEQPQPLQHGVVQKEEQPSYPGISEVVPQSTA

SEQ ID NO: 12174 - protein, 176 aa, Triticum aestivum
  misc_feature (124)..(124): Xaa can be any naturally occurring amino acid
MAPTVMASSATSVAPFQGLKSTAGLPVSRRSSSAGLGSVSNGGRIRCMQVWPIEGIKKFETLSYLPPLSTEALLKQVDYLIRSKWVPCLEFSKVGFVFREHNSSPGYYDGRYWTMWKLPMFGCXTDATQVLNEVEEVKKEYPDAYVRVIGFDNLRQVQCVSFIAFRPPGCEESGKA

SEQ ID NO: 12175 - protein, 294 aa, Saccharomyces cerevisiae
TTPLVHVASVEKGRSYEDFQKVYNAIALKLREDDEYDNYIGYGPVLVRLAWHTSGTWDKHDNTGGSYGGTYRFKKEFNDPSNAGLQNGFKFLEPIHKEFPWISSGDLFSLGGVTAVQEMQGPKIPWRCGRVDTPEDTTPDNGRLPDADKDADYVRTFFQRLNMNDREVVALMGAHTLGKTHLKNSGYEGPWDATNNVFDNSFYLNLLNEDWKLEKNDANNEQWDSKSGYMMLPTDYSLIQDPKYLSIVKEYANDQDKFFKDFSKAFEKLLENGITFPKDAPSPFIFKTLEEQGL

SEQ ID NO: 12176 - protein, 430 aa, Pneumocystis carinii
MVEKARTFKTLNPQTMFSTQLIPLNKKFSENGGHITSSFYIHRGYPKHYKFKSLEYVGVSFHYHHQRRGHLEFNITSPSGVTSVLAHRRNRDKHGGSILWTFMTVKHWYFVSFCKIITNDFRGESIVGNWTIDVEDKKDENLDGGVFDWQLHFFGESCESEGVPPPSYPFLSRYPTTTPPPDPDATPSPDLDANLQPDSNADSQPQPDVKPLPSLDIEPQPPSEPDPNPPSYPSSQQDPDTSLSSNPTSTSSSEPPPPPPPRPEPQPQPETQPETQPPQPPQPPQPPQSETQPETQPEPEPEPRPEPEPEPEPEPQPPQSVPQPPQPETQPEPQPEPPASPPKLQPEQKPTSITSSTSTTSSTSTTSSSKTKISTTRKASCTITVFIGPSPTEGVSTGSSVSHLSFFEKRHLLLQMILLLFFFLFLGYSF

SEQ ID NO: 12177 - protein, 292 aa, Leuconostoc mesenteroides subsp. mesenteroides ATCC 8293
MDYKTLASGIEMPLLGFGVFQVQEKGAAKQAVLDAIKTGYRLIDTAASYGNEREVGEAILEAINQGIVKREELFVTSKMWVQDVSAQQATAAIQSSLQRLNLDYLDLYLIHQPYNDVFGAWRAMESAYRSGQLKAIGVSNFDIAQLTNLAEFSDIKPMLNQIEVNPFQQNKKDITYFSQYGVQVEAWAPFAEGKNDLFSNILLRKIADKHHKSIAQIVLRWLTQRNIIVVAKSVKPERMAQNLDIFDFKLTHQELAEIETLDTNSSQFFNHADPDMIKWMANREISYDVTFN

SEQ ID NO: 12178 - protein, 489 aa, Photorhabdus luminescens subsp. laumondii TTO1
MRIQNKMLINGDWIDASDGQTIEVMNPHDGSLITRVAEAKEADVDCAVAAAKAAYPAWGRLQASERGALLLKLADKIEEHAAELAQLETMDTGHPIRDTLNIDVPRTAYCFRYFGGMADKLEGSVIPVEEGFLNYTTREPIGVVGQIVPWNFPLMFTSWKMAPALAAGNTIVIKPSEITPLSTLRIAELMMEVGFPPGVINVVVGYGNSAGARLSEHEDVGKIAFTGSTMTGQSIVAASAGNLKKVQLELGGKGANIIFEDADLTKAVGGSAWAIFHNQGQACIAGSRIILHESIADAFLEKFLTLAGSIRLGDPLLPETEMGPVTSLQHRERVLAYCDVARSQGCEILLGGKPPADPALANGCYIEPTVVRAKYSDRIAQEEVFGPFVTVITFKNDEEALAIANSTEYGLGSGLWTKDISRAHRFARDMHAGMVWINCYKRVNPASPFGGVGRSGYGREMGFEVMREYTQVKSVWVNVDAKIPPFYQR

SEQ ID NO: 12179 - protein, 135 aa, Triticum aestivum
MCPIKKEMSGESGSPCSGENFYSPSTSREHQQAKQAAWTSAPAKRPAGRTKFRETRHPVYRGVRRRGNAGRWVCEVRVPGRRGSRLWLGTFDTAEAAARANDAAMIALSAGGAGCLNFADSAELLAVPAASSYRS

SEQ ID NO: 12180 - protein, 279 aa, Lactobacillus johnsonii NCC 533
MATIQWYPGHMNKAKNQLEDNLDLIDVLIEVLDARLPVSSRNPMIGQLTKKKPHIIVLNKADLADPIQTKKWTHYYQDEGNFVISMDAQHTTNMTSLFKIIKLAGKEKTDKLIAKGASNPMIRVAIAGIPNCGKSTIINRMVGRNAAIVGDKPGVTRGQSWLKTKTNVQILDTPGILWPKFSDQEVGYKLAACGAIKADIFHPDDVALFVIEFLKQNYRDDLVKFARISSEEMDSMSNPDLLLAMTNKYGMRDDYDKFSLFMLQRLRKGKLGRITFDLR

SEQ ID NO: 12181 - protein, 102 aa, Triticum aestivum
MGERVKGTVKWFNVTKGFGFISPDDGGEDLFVHQSAIKSDGYRSLNENDAVEFEIITEDSKARWFIICSQLMEERPHSQEEEIVDADRLSEHTLSSRFGSSV

SEQ ID NO: 12182 - protein, 365 aa, Glycine max
  misc_feature (98)..(98): Xaa can be any naturally occurring amino acid
MGSTGETQITPTHVSDEEANLFAMQLASASVLPMILKSALELDLLEIIAKAGPGVHLSPTDISSQLPTQNPDAPVMLDRILRLLACYNILSFSLRNSXDGKVERLYGLAPVAKYLVKNEDGVSIAALNLMNQDKVLMESWYYLKDAVLEGGIPFNKAYGMTAFEYHGTDPRFNKVFNKGMADHSTITMKKILETYTGFEGLKSLVDVGGGTGAVVNMIVSKHPTIKGINFDLPHVIEDAPSYPGVEHVGGDMFASVPKADAIFMKWICHDWSDEHCLKFLKNCYEALPDNGKVIVAECILPVAPDSSLATKGVVHIDVIMLAHNPGGKERTEKEFEALAKGSGFQGFRVLCCAFNTYVMEFLKKV

SEQ ID NO: 12183 - protein, 183 aa, Escherichia coli CFT073
MQDSILTTVVKDIDGEVTTLEKYAGNVLLIVNVASKCGLTPQYEQLENIQKAWADRGFVVLGFPCNQFLEQEPGSDEEIKTYCTTTWGVTFPMFSKIEVNGEGRHPLYQKLIAAAPTAVAPEESGFYARMVSKGRAPLYPDDILWNFEKFLVGRDGKVIQRFSPDMTPEDPIVMESIKLALAK

SEQ ID NO: 12184 - protein, 301 aa, Solanum tuberosum
MVSNYISATVSSILLFLLCSSSLFGASMAALVQEQPLVLKYHNGALLKGTVTVNLIWYGKFTPIQRSIIVDFLQSLNSPKAPNPSAASWWKTTEKYKTGASTVTLGKQILDENCSLGKSLKNSHIVYLASKGGYMGRSVNLVLTAKDVFVEGFCSRCGSHGSTRGKVRFTYAWVGNSETQCAGQCAWPFHQPIYGPQTPPLLAPNGDVGVDGMIINVATVLAGTVTNPFNNGYFQGPATAPLEAVSACTGMFGSGSYPGYPGQTLVDKSTGASYNAHGVNGRRFLLPAMWDPTKSACSALV

SEQ ID NO: 12185 - protein, 429 aa, Burkholderia cepacia R18194
MSNYLNSTEAAARLGVSRQTLYAYVSRGLLRAEPGSSHRESRYLAADVDRLADQRARGHKPKEVAKAALNWGSPVLESSITLIDGGRLFYRGVDALELATRASLEDVAALLWRCDEQTAFGRRVPTTPSVLRTLFRHYDNQRAEQALLPLFTVASEDAPTAIWHQSADRHAQGCGDLVRILAACLLRTRIDTAPIHEQCARAWGVGPAGAELIRMALVLCADHELNASSFTGRCIASTNASLRAVVVGGLAGLSGERHGAATARGEALWDELGNKDVEQKMGERLARGDGLPGFGHALYPDGDVRATYLLSRILPRHPQWKRMIDAGSALVGQKPSLDLALVALRRHLRLPVGAAFGLFALGRSIGWIAHGLEQREQSDLIRPRAVYTGTWPDGAGADHARSRGRSGKQQTTQAAAPKDDMLAAFFRNR

SEQ ID NO: 12186 - protein, 380 aa, Vibrio vulnificus CMCP6
MPSSLTKKGELGGAGLRGQSAGSTALCTVGKTGTGLTYRGYDITDLANHAQFEEVAYLLLRGHLPTQQELDAYKTRLIGLRGLPVELKQALELIPASAHPMDVMRTGCSVLGNLEQETDFSQQLDATERMLALFPAIICYWYRFSHDGVRIDTQDQSQDCIGGYFLKMLTGKEPSELHKQVMHCSLILYAEHEFNASTFAARVCASTLSDIHSCVTAAIGTLRGPLHGGANEAAMEMIENWQTPEEAESNILRMLANKEKIMGFGHAIYRESDPRNALIKRWSKALSEAVGDTHLYAVSERVEAVMKREKDLFCNADFFHASAYHFMDIPTKLFTPIFVMSRLTGWTAHVFEQRANNRIIRPSADYIGPDHQDWVPIEQR

SEQ ID NO: 12187 - protein, 462 aa, Erwinia pyrifoliae
  misc_feature (354)..(354): Xaa can be any naturally occurring amino acid
  misc_feature (381)..(381): Xaa can be any naturally occurring amino acid
MMKNVSSAVAVSRNPATGEVFARYPFATIAEVDSALALTNGAFQYWRHSAMSDRVQLLCNVADALRQQARELAEMMTSEMGKPVDQGLAEVEKSARLCEWYAGHGPAFLQREPTLVEGNKAFVDYLPLGPVLSVMPWNFPVWQVLRGAVPILLAGNSYLLKPAPNVMGCALLLQQILTRVGVPEGLFAVVNADNDGVAQAINDRRIAAVTVTGSVRAGAAIAALSGAAIKKCVLELGGSDAFIVLADADIDAAVKGAIAGRFMNNGQLCISAKRIIVEAPVFDAFRDKFVSAVKEMKIGDPRESGTWIGPMARYDLRDELDSQVQATLKEGATLLLGGHVLPGEGNYYAPTVLXDVKPGMTSFAQELFGPVASLIQADNAXHAVAMANDSEFGLGGSMWSRDLAVAQKLASRIETGGVFINSPSFSDPRVPIGGVKKSGFGRELSHFGLREFTNTQTVWMEE

SEQ ID NO: 12188 - protein, 340 aa, Atropa belladonna
MAFRNGSTTTTITTINHPNDASTIPKNGTNITTTLLKNGSTNEFGCIKPGWFSEFSQLWPGEAFSLKIEKLLFQGKSDYQDVMLFESATYGKVLTLDGAIQHTENGGFPYTEMIVHLPLGSIPSPKKVLIIGGGIGFTLFEVFRYPTIENIDIVEIDNVVVDVSRKFFPYLAAGFDDPRVTLVLGDGAAFVKAAQAGYYDAIIVDSSDPIGPAKDLFERPFFEAVAKALRPGGVVCTQAESIWLHMHIIKQIIDNCRQVFKGSVNYAWTTVPTYPTGVIGYMLCSTKGPQVDFRNPVNPIDKKTSHIKSKGPLKFYNSDIHKAAFILPSFARNLMESELD

SEQ ID NO: 12189 - protein, 448 aa, Lotus corniculatus var. japonicus
MVLRKVGKYEIGRTIGEGTFAKVKFAQNTETGESVAMKVLDRNTIIKHNMVDQIKREISIMKLVRHPYVVRLYEVLASRTKIYIILEFITGGELFDKIIRHGRLSEAESRRYFQQLIDGVDYCHSKGVYHRDLKPENLLLDSLGNIKISDFGLSALPEQGVSILRTTCGTPNYVAPEVLSHKGYNGAVADVWSCGVILYVLLVGYLPFDELDLTSLYSKIEKAEYSCPPGFPVGAKTLIHKILDPNPETRITIEQIRNDEWFQRGYVPVSLLEYEDVNLDDVNAVFDDAEEQRANQQCDHEDMGPLMLNAFDLIILSQGLNLAAIFDRGQDSMKYQTRFITQKPAKVVLSSMEVVAQSMGFKTHIRNYKMRVEGLSAKKTSHFSVMLEIFEVAPTFYMVDIQKAAGDAGEYLKFYKNFCGNLEDIIWKPPHESTKSKVSKTRSKRRSR

SEQ ID NO: 12190 - protein, 205 aa, Glycine max
  misc_feature (110)..(110): Xaa can be any naturally occurring amino acid
  misc_feature (112)..(112): Xaa can be any naturally occurring amino acid
  misc_feature (120)..(121): Xaa can be any naturally occurring amino acid
  misc_feature (123)..(124): Xaa can be any naturally occurring amino acid
  misc_feature (126)..(126): Xaa can be any naturally occurring amino acid
  misc_feature (129)..(131): Xaa can be any naturally occurring amino acid
  misc_feature (133)..(133): Xaa can be any naturally occurring amino acid
  misc_feature (142)..(142): Xaa can be any naturally occurring amino acid
MATYSWSTEIFSFLVLTLLSTSSHTMVAGARNLLESTLSKPEVPTLPKPHELPPLPEIPELPKFESPKIPALPKPELPKVPELSKPDMSKVPELPKVPERLKVPEISKIXEXPKPELPKXXEXXKXELXXXPXIPKVPEFPXPELPKVPEVPKPELSKVPKLPKSELPKVPEIPELPKSELPKIPEIPKVPEFPKVPKAFSTTNP

SEQ ID NO: 12191 - protein, 338 aa, Hyoscyamus niger
MEVISNHNNGSTTKIILKNGSICNGNVNGNSHSNEKTENKLVECTNSIKPGWFSEFSALWPGEAFSLKIEKLLFQGKSDYQDVMLFESATYGKVLTLDGAIQHTENGGFPYTEMIVHLPLGSIPSPKKVLIIGGGIGFTLFEVSRYSTIEKIDIVEIDDVVIDVSRKYFPYLAAGFDDPRVTLIVGDGAAFVKAAQPGYYDAIIVDSSDPIGPAKDLFERPFFEAVTKALRPGGVVCTQAESIWLHMHLIKQIIANCRQVFKGSVNYAWTTVPTYPTGVIGYMLCSTEGPEVNFKNPVNSIDKDTTHVKSKGPLKFYNSDIHKAAFILPSFARDLVEF

SEQ ID NO: 12192 - protein, 376 aa, Halobacterium sp. NRC-1
MSDELKKGLEDVLVAESDLSFIDGDAGKLVYCGYAIEDLARTASYEEVLYLLWHGDLPTRSELDAFRADMASHREIDDDVLALVENLAAADADPMAALRTAASALSAHDDTAGGSDPDDARESGKRITAKLPTIVAAFTRLRNGDDVVAPRDDLGHAANFLYMLNGEAPDDVLADVFDQALVLHADHGLNASTFSGMVTASTLADVHAAVTSAIGTLSGSLHGGANANVMRMLKEVDDSDKDPLSWVQDALANGERVMGFGHRVYNVKDPRAHILSERSEELGAAAGDTKWYEMSVAIEDYMADEKGLAPNVDFYSASTYYQMGIPVDIYTPIFAMSRVGGWVGHVLEQYDDNRLIRPRARYVGAEDRDSTPLDER

SEQ ID NO: 12193 - protein, 336 aa, Atropa belladonna
MEVNHNNGSTTKIILKNGSICNGDVNGNSHTHKKIENKLVECTNSIKPGWFSEFSALWPGEAFSLKIEKLLFQGKSDYQDVMLFESATYGKVLTLDGAIQHTENGGFPYTEMIVHLPLGSIPSPKKVLIIGGGIGFTLFEVSRYPTIDTIDIVEIDDVVVDVSRKYFPYLAAGFDDPRVTLIIGDGAAFVKAAQPGYYDAIIVDSSDPIGPAKDLFERPFFEAVAKALRPGGVVCTQAESIWLHMHLIKQIIANCRQVFKGSVNYAWTTVPTYPTGVIGYMLCSTEGPEVNFKNPVNSIDKDTSHVKSKGPLKFYNSDIHKAAFILPSFARDLVEF

SEQ ID NO: 12194 - protein, 377 aa, Candida albicans SC5314
MSADGEFTRTQIFGTVFEITNRYTELNPVGMGAFGLVCSAVDRLTGQNVAVKKVMKPFSTSVLAKRTYRELKLLKHLKHENLITLDDIFISPLEDIYFVNELQGTDLHRLLNSRPLEKQFIQYFTYQIMRGLKYIHSAGVIHRDLKPSNILINENCDLKICDFGLARLQDPQMTGYVSTRYYRAPEIMLTWQKYDTEVDLWSVGCILAEMIEGKPLFPGKDHVHQFSIITELLGSPPADVIDTICSENTLRFVQSLPHRDPIPFSERFASCTHVEPEAIDLLAKLLVFDPKKRISAVEGLTHPYMEAYHDPTDEPVCESKFDWSFNDADLPVDTWRVMMYSEILDFHQTVGVANETEGSEQPDSQVEQNNLDSANGA

SEQ ID NO: 12195 - protein, 161 aa, Oryza sativa (japonica cultivar-group)
MQEEFQLALFKNKRKENLFANRIFDLFDVKKRGVIDFGDFVRALNVFHPNIPMEEKIDFSFKLYDMDNTGFIERKEVKQMLIALLGESEMRLSDEIIETILDKTFSDADTNQDGRIDRTEWENFVSRNPSLLKIMTLPYLKDITTTFPSFVFNSEVDDLVT

SEQ ID NO: 12196 - protein, 406 aa, Zea mays
  misc_feature (54)..(54): Xaa can be any naturally occurring amino acid
MASNGCNGNGNGNGNGKAAPAGVVVPEIKFTKLFINGEFVDAASGKTFDTRDPXYQGYTLKEPIGVVGVIIPWNFPTMMFFLKVSPALAAGCTVVVKPAEQTPLSALYYAHLAKMAGVPDGVINVVPGFGPTAGAALASHMDVDSVAFTGSTEVGRLIMESAARSNLKTVSLELGGKSPLIIFDDADVDMAVNLSRLAVFFNKGEVCVAGSRVYVQEGIYDEFVKKAVEAARSWKVGDPFDVTSNMGPQVDKDQFERVLKYIEHGKSEGATLLTGGKPAADKGYYIEPTIFVDVTEDMKIAQEEIFGPVMSLMKFKTVDEVIEKANCTRYGLAAGIVTKSLDVANRVSRSVRAGTVWVNCYFAFDPDAPFGGYKMSGFGRDQGLAAMDKYLQVKSVITALPDSPWY

SEQ ID NO: 12197 - protein, 500 aa, Zea mays
MSSSPSFGLLAVAALLLALSLAQHGSLAATVGPRVIVVGAGMSGISAAKRLSEAGITDLLILEATDHIGGRMHKTNFAGINVELGANWVEGVNGGKMNPIWPIVNSTLKLRNFRSDFDYLAQNVYKEDGGVYDEDYVQKRIELADSVEEMGEKLSATLHASGRDDMSILAMQRLNEHQPNGPATPVDMVVDYYKFDYEFAEPPRVTSLQNTVPLATFSDFGDDVYFVADQRGYEAVVYYLAGQYLKTDDRSGKIVDPRLQLIKVVREIKYSPGGVTVKTEDNSVYSADYVMVSASLGVLQSDLIQFKPKLPTWKVRAIYQFDMAVYTKIFLKFPRKFWPEGKGREFFLYASSRRGYYGVWQEFEKQYPDANVLLVTVTDEESRRIEQQSDEQTKAEIMQVLRKMFPGKDVPDATDILVPRWWSDRFYKGTFSNWPVGVNRYEYDQLRAPVGRVYFTGEHTSEHYNGYVHGAYLSGIDSAEILINCAQKKMCKYHVQGKYD

SEQ ID NO: 12198 - protein, 426 aa, Lotus corniculatus var. japonicus
GRVLGQGNFAKVYHGRNLATNENVAIKVIKKEKLKKDRLVKQIKREVSVMRLVRHPHIVELKEVMATKGKIFLVMEYVKGGELFTKVNKGKLNEDDARKYFQQLISAVDFCHSRGVTHRDLKPENLLLDENEDLKVSDFGLSALPEQRRDDGMLVTPCGTPAYVAPEVLKKKGYDGSKADIWSCGVILYALLSGYLPFQGENVMRIYRKAFKAEYEFPEWISPQAKNLISNLLVADPEKRYSIPEIISDPWFQYGFMRPLAFSMKESAVGEDSTIDHFGGEEEEVPELVAAMGKPARPFYNAFEIISSLSHGFDLRSLFETRKRSPSMFISKYSASAVVAKLEGMAKKLNFRVTGKKEFTVRMQGMKEGRKGKLAMTMEVFEVAPEVAVVEFSKSAGDTLEYVKFCEEQVRPSLKDIVWSWQGDSN

SEQ ID NO: 12199 - protein, 291 aa, Saccharomyces cerevisiae
LVHVASVEKGRSYEDFQKVYNAIALKLREDDEYDNYIGYGPVLVALAWHISGTWDKHDNTGGSYGGTYRFKKEFNDPSNAGLQNGFKFLEPIHKEFPWISSGDLFSLGGVTAVQEMQGPKIPWRCGRVDTPEDTTPDNGRLPDADKDAGYVRTFFQRLNMNDREVVALMGAHALGKTHLKNSGYEGPWGAANNVFTNEFYLNLLNEDWKLEKNDANNEQWDSKSGYMMLPTDYSLIQDPKYLSIVKEYANDQDKFFKDFSKAFEKLLENGITFPKDAPSPFIFKTLEEQGL

SEQ ID NO: 12200 - protein, 427 aa, Escherichia coli O157:H7
MADTKAKLTLNGDTAVELDVLKGTLGQDVIDIRTLGSKGVFTFDPGFTSTASCESKITFIDGDEGILLHRGFPIDQLATDSNYLEVCYILLNGEKPTQEQYDEFKTTVTRHTMIHEQITRLFHAFRRDSHPMAVMCGITGALAAFYHDSLDVNNPRHREIAAFRLLSKMPTMAAMCYKYSIGQPFVYPRNDLSYAGNFLNMMFSTPCEPYEVNPILERAMDRILILHADHEQNASTSTVRTAGSSGANPFACIAAGIASLWGPAHGGANEAALKMLEEISSVKHIPEFVRRAKDKNDSFRLMGFGHRVYKNYDPRATVMRETCHEVLKELGTKDDLLEVAMELENIALNDPYFIEKKLYPNVDFYSGIILKAMGIPSSMFTVIFAMARTVGWIAHWSEMHSDGMKIARPRQLYTGYEKRDFKSDVKH

SEQ ID NO: 12201 - protein, 215 aa, Methanococcus maripaludis S2
MKFFLDTANVEKIKEFNALGLVDGVTTNPSLIKKEGRDFYEVIKEICSIVDGPVSAEVIALDSEGMVKEARELVKLAENVVVKIPMTKEGMKAVNILSKEGIKTNVTLIFSANQALLAAKAGASYVSPFVGRLDDVGQDGMFLISEVMQVFGAYGIETEVIVASVRHPIHVLESAKMGADIATIPFDVLDKLFNHPLTDNGIAKFLSDWEAHMNR

SEQ ID NO: 12202 - protein, 160 aa, Zea mays
MDARMFGLENPLVAALHHLLDVPDGDAGAGGDKAGGGATRTYVRDARAMAATPADVKELAGAYAFVVDMPGLSTGDIRVQVEDERVLVISGERRREEREDAKYLRMERRMGKFMRKFVLPDNADVDKVAAVCRDGVLTVTVEKLPPQEPKKPKTIEIKVA

SEQ ID NO: 12203 - protein, 502 aa, Zea mays
MATANGSSKGSFEVPKVEVRFTKLFIDGKFVDAVSGKTFETRDPRTGEVIASIAEGGKADVDLAVKAAREAFDNGPWPRMTGYERGRILHRFADLIDEHVEELAALDTVDAGKLFAVGKARDIPGAAHLLRYYAGAADKVHGATLKMAQRMHGYTLKEPVGVVGHIVPWNYPTTMFFFKVGPALAAGCAVVVKPAEQTPLSALFYAHLAREAGVPAGVLNVVPGFGPTAGAAVAAHMDVDKVSFTGSTEVGRLVMRAAAESNLKPVSLELGGKSPVIVFDDADLDMAVNLVNFATYTNKGEICVAGTRIYVQEGIYDEFVKKAAELASKSVVGDPFNPSVSQGPQVDKDQYEKVLRYIDIGKREGATLVTGGKPCGDKGYYIEPTIFTDVKDDMTIAQDEIFGPVMALMKFKTVEEVIQKANNTRYGLAAGIVTKNIDVANTVSRSIRAGAIWINCYFAFDPDAPFGGYKMSGFGKDMGMDALDKYLQTKTVVTPLYNTPWL

SEQ ID NO: 12204 - protein, 102 aa, Brassica napus
  misc_feature (21)..(21): Xaa can be any naturally occurring amino acid
SPSSSSSDDVAAPLLPKSHGXDEVAYDEFNGASFSGAVFNLATTIIGAGIMALPATMKILGLVLGIAMIVVMAFLTDASIEFLLRFSKIKRSRSYGGLMGDS

SEQ ID NO: 12205 - protein, 178 aa, Glycine max
  misc_feature (115)..(115): Xaa can be any naturally occurring amino acid
MASSMISSPAVTTVNRAGAGMVAPFTGLKSMAGFPTRKTNNDITSIASNGGRVQCMQVWPPVGKKKFETLSYLPDLDDAQLAKEVEYLLRKGWIPCLEFELEHGFVYREHNRSPXYYDGRYWTMWKLPMCGYTDAAQILNKLQYANTTYPNSFIRIIIFHNIPQIQCISLITYKHPSF

SEQ ID NO: 12206 - protein, 119 aa, Triticum aestivum
MSAVNITNVAVLDNPTAFLNPFQFEISYECLVPLDDDLEWKLTYVGSAEDETYDQQLESVLVGPVNVGTYRFVFQADPPDPLKIREQDIIGVTVLLLTCSYVGQEFMRVGYYVNNDYDE

SEQ ID NO: 12207 - protein, 117 aa, Streptococcus constellatus subsp. pharyngis
MTKIYDFSIFDQNNRSISLEIYKGNVLLIVNTATGCGLTPQYKGLQHLYTRYQNQGFEILDFPCNQFMGQAPGTAEEINRFCSLHYQTTFPRFAKVKVNGKEADPLYIWLKEQQAGP

SEQ ID NO: 12208 - protein, 505 aa, Xanthobacter autotrophicus
MNKPEIAITKQSPFKARYGNFIGGKFVEPVGGRYFDNTSPVTGGKICEIARSDADDIEKALDAAHAAKDAWGKTSAAVRALILNRIADRMEENLDLLALAETWDNGKPIRETTAADMPLAIDHFRYFAGAVRAQEGGISEIDHDTVAYHFHEPLGVVGQIIPWNFPILMAVWKLAPALAAGNCVVLKPAEQTPASILVLAELIADLLPPGVLNIVNGFGLEAGKPLASSSRIAKIAFTGETTTGRLIMQYASQNLIPVTLELGGKSPNIFFADVVAEDDDFFDKAVEGFVMFALNQGEVCTCPSRALIQESIYDRFMEKALKRVAAIVQGSPLDPATMIGAQASSEQLEKILSYIDIGKQEGAEVLIGGERNTFGGDLAGGYYVKPTVFKGHNKMRIFQEEIFGPVVSVTTFTDDAEALHIANDTLYGLGAGVWTRDGNRAYRFGRAIQAGRVWTNCYHAYPAHAAFGGYKQSGIGRENHKMMLDHYQQTKNMLVSYSPKKLGFF

SEQ ID NO: 12209 - protein, 148 aa, Triticum aestivum
  misc_feature (25)..(25): Xaa can be any naturally occurring amino acid
MEGRMFGLETPLMAALQHLLDIPDXPTRAYVRDARAMAATPADVKELPGAYAFVVDMPGLGSGDIKVQVEDERVLVISGERSREEEEDPKYLRMEPRMGKLMRKFVLPENADMEKISPACRDGVLPVPVEKLPPPEPKKPKPIQVQVA

SEQ ID NO: 12210 - protein, 146 aa, Rosa hybrid cultivar 'Vivaldi'
DATTHKFKGKTVMTESERYESLRHCKWVDEVIPDAPWVVNEEFLDKHNIDYVAHDSLPYADASGAGKDVYEFVKAVGRFKETKRTEGISTSDIIMRIVKDYNQYVLRNLDRGYTRKELGVSFVKEKRLRVNMRVKKLQEKVKEKKK

SEQ ID NO: 12211 - protein, 112 aa, Bartonella vinsonii subsp. berkhoffii
ANEACLKMLLEIGSVKRIPEFIARAKDKNDPFRLMGFGHRVYKNYDPRAKIMQKTCHEVLKELNIQNDPLLDIAIELEKIALNDEYFVEKKLYPNVDFYSGITLKALGFPTE

SEQ ID NO: 12212 - protein, 416 aa, Escherichia coli
MESKVVVPAQGKKITLQNGKLNVPENPIIPYIEGDGIGVDVTPAMLKVVDAAVEKAYKGERKISWMEIYTGEKSTQVYGQDVWLPAETLDLIREYRVAIKGPLTTPVGGGIRDLNVALRQELDLYICLRPVRYYQGTPSPVKHPELTDMVIFRENSEDIYAGIEWKADSADAEKVIKFLREEMGVKKIRFPEHCGIGIKPCSEEGTKRLVRAAIEYAIANDRDSVTLVHKGNIMKFTEGAFKDWGYQLAREEFGGELIDGGPWLKVKNPNTGKEIVIKDVIADAFLQQILLRPAEYDVIACMNLNGDYISDALAAQVGGIGIAPGANIGDECALFEATHGTAPKYAGQDKVNPGSIILSAEMMLRHMGWTEAADLIVKGMEGAINAKTVTYDFERLMDGAKLLKCSEFGDAIIENM

SEQ ID NO: 12213 - protein, 506 aa, Xanthobacter autotrophicus
MNSPAFLSSAHTSPFKPRYGNFIGGTFVEPVSGRYFENTSPITGKVICEVPRSDEHDIERALDAAHAAKKAWGRTSAADRALVLLKIADRLEANLELLAGAETWDNGKPIRETTLADIPLAIDHFRYFAACVRAQEGTLGEIDHDTIAYHYHVPLGVVGQIIPWNFPILMAAWKLAPALGAGNCVVLKPAEQTPASILVLAELIADLLPPGVLNIVNGFGLEAGKPLASSPRISKIAFTGETGTGRLIMGYAAQNLIPVTLELGGKSPNIFFADVAAEDDDFLDKAVEGFVMFALNQGEVCTCPSRALVQESIFDKFMEKALARVAAIKQGSPLDPSTMIGAQASSEQMHKILSYIDIGRAEGAQVLAGGERNVLTGELADGFYVKPTVFLGKNNMRIFQEEIFGPVVSVTTFKDEEEALHIANDTLFGLGAGLWTRDGSRAYRVGREIEAGRVWTNCYHAYPAHAAFGGYKQSGIGRETHKMMLDHYQQTKNLLVSYSPKKLGFF

SEQ ID NO: 12214 - protein, 327 aa, Fusobacterium nucleatum subsp. vincentii ATCC 49256
MEIEKMEKKLAILTSGGDAPGMNAAIRATAKIAESYGFEVYGIRRGYLGMLNDEIFPITGRFVSGIIDKGGTVLLTARCEEFKQARFREIAANNLKKKGIEYLVVIGGDGSYRGANLLYKEHGIKVVGIPGTIDNDICGTDFTLGFDTCLNTILDAMSKIRDTATSHERTILIQVMGRRAGDLALHACIAGGGDGIMIPEMDNPIEMLALQLKERRKNGKLHDIVLVAEGVGNVFEIEEKLRGHINSEIRSVVLGHIQRGGTPSGRDRVLASRMAAKAVEVLSKGEAGVMVGIEKNEMVTHTLEKACSVEKRKSIEKDYELALLLSK

SEQ ID NO: 12215 - protein, 327 aa, Triticum aestivum
MASRTAAVPEVALRSGDARPMPAIGMGTAQSPVVPDTTVKAVLEAVEVGYRHFDTASMYATERPLGEALAEAVRRGLLASREEVFVTSKLWCTQCHPHLVLPSLQESLQNLQMEYVDLYLIHWPISLKPGPVVFPVKREDAVPFDLEGVWRAMEECHRLGLAKAIGVSNFTTRHLDKLLPAATVPPAVNQVEMNPVWQQRKLREYCAEKGIHVAAYSPLGGQNWSGDGNAVLDSEVLAEIAKARGKSVAQVALRWIYEQGVTPIVKSFSKERLKENLGIFDWGLTDDDLRKIGQIPQKKIVKAETVLFSAEGEFTSADLADMEIVED

SEQ ID NO: 12216 - protein, 483 aa, Zea mays
MANNSSYGENARRKPHTPSAIVIGGGFAGLAAADALRNASFQVILLESRDRIGGRVHTDYSFGFPVDLGASWLHGVCEENPLAPIIGRLGLPLYRTSGDDSVLFDHDLESYALYDTNGRQVPQELVEKLGKVFEKILEETGKLREEINEDMSIAKAIAIVMARNPHLRQEGIAHEVLQWYLCRMEGWFATDADSISLQGWDQEVLLPGGHGLMVRGYRPVINTLAKGLDIRLNHKVVEIVRHRNRVEVTVSSGQTFVADAAVVTVPLGVLKAKTIRFEPRLPEWKEEAIRELTVGVENKIVLHFGQVFWPNVEFIGVVSSSTYGCSYFLNLHKATGHPVLVYMPAGRLARDIEKTSDEAAAQFAFSQLKKILPNAAEPINYLVSRWGSDENTLGSYTFDGVNKPRDLYEKLRIPVDNLFFAGEATSVKYTGTVHGAFSTGVMAAEECKMRVLERFRELDMLEMCHPAMGEDSPVSVPLLISRL

SEQ ID NO: 12217 - protein, 139 aa, Ustilago maydis 521
MSSGVKVSQECLDKFQELKLGKKIKYIIYSLNDKNTEIVVQNTSTSTSYDDFLAELPPTECRYAIYDFEYEKGDAGKRNKICFFSWSPDDAKIKPKMVFASSKDALRKALVGISTEIQGTDFSEVSYDTVLDKVSRSTF

SEQ ID NO: 12218 - protein, 135 aa, Haloarcula marismortui ATCC 43049
MSDRDPFSEIERAFDMLGEQFGVDMGAIPVDVLDKGDAFLVHADLPGYDSEDIDVQLVEDRKLTISATSSQERESTDGQYVQRERRQQSLSRSVRLPEAVDDGETTASYDSGVLTVRLAKVGHNEDDDGTDIPVN

SEQ ID NO: 12219 - protein, 397 aa, Lotus corniculatus var. japonicus
LKKERLVKQIKREVSVMRLVRHPHIVELKEVMATKTKIFMVVEYVKGGELFAKLTKGKMTEVAARKYFQQLISAVDFCHSRGVTHRDLKPENLLLDDNEDLKVSDFGLSSLPEQRRSDGMLLTPCGTPAYVAPEVLKKKGYDGSKADIWSCGVILYALLCGYLPFQGENVMRIYSKSFKADYAIPEWISPEAKNLISKLLVVDPEKRYSIDEIMRDPWFEIGFMRPLAFSMKASAVDDTVIDFNDDVVEDLDPKSDVGGGEFVEAARPSYNAFEIISSLSHGFDLRNLFETRKRSPSTFISKLSASAVVAKLEAVAKKLNLRITGKKEFMVRMQGVTEGRKGKVGMTVEVFEVAPEVAVVEFSKNAGDTLEYIKLCEDQVRPSLNDIVWSWQGQGSS

SEQ ID NO: 12220 - protein, 127 aa, Bordetella parapertussis 12822
MALSKAEILDAIAGMSVLELSELIKEMEEKFGVSAAAAAVAVAAPAAGGAGAAAAEEQTEFTVVLLEAGANKVSVIKAVRELTGLGLKEAKDLVDGAPKPVKEALPKADAEAAKKKLEEAGAKVEVK

SEQ ID NO: 12221 - protein, 346 aa, Rhodococcus erythropolis
MTTVEVPHSSRSAVLTVSGVIEETSDARSLVFEIPAELKDKFDYKPGQFLTLRIPSDQTGSVARCYSLASSPFTDDAPKVTVKRTVDGYGSNWLCDKLQVGDTIEVLPPSGVFTPKSLDHDFLLFGAGSGITPVISILKSALTQGSGNVVLIYANRDEKSVIFGAELRELAAQHPGRLTVVHWIETVQGLPAVSQLATLAKPFVAYEAFMCGPGPFMDAVHKALAEAGMPRTQVHAEVFNSLAGDPFRDVEVAEVSDEEAADAATVEVELDGETHTLVWPRKQTLVDIMLAKGLDVPYSCKEGESGSCACTVTEGEVQMDNSEILDAEDVANGYILGCKRSRSPIA

SEQ ID NO: 12222 - protein, 499 aa, Rhodospirillum rubrum
MTQAAPPIDWTARARALRLPNHALIDGAPASAGDGATFDCVSPIDGRVLTRVAACGAADVDRAVAAGRAAFEDRRWCGLSPAARKKILLAFAERIEAHRDELALLETLDMGKPIADSLAVDVPATARCLRWYAEALDKVYGEVAPTGDDVLATITREPLGVVGVVVPWNFPMIMAAWKIAPALAAGNSVVLKPAEQSPLTAIRLGELALEAGLPAGVLNVVPGLGPVTGRAIGLHPDIDGAFFTGSTAVGKLFLSYSSQSNMKRLGLECGGKSAHIVLASCKNTTAAAQAAASAIFFNQGEMCTAGSRLIVERAIADEVIEKVVAEAAFWRPGPPLDPATRMGALVDAEQTERVLGYIALGQDEGARLATGGSRAMAESGGCYVEPTIFTGVAPTMRIAREEIFGPVLSVITVESADEAVRVANDSDYGLAAAVWSDDVTTLHRVAKRLRAGMVYANCYDADDITVPFGGFKQSGIGRDKSLHAIDKYTELKTTWLRLG

SEQ ID NO: 12223 - protein, 440 aa, Candida albicans SC5314
MPSIDNDAGASTVSSSISLVKTIIGAGLLSMPLAYSTDGIIFGTFIILLAAFTSGFGLFLQCYVSRYVPVKHATFFNLCSITYPHLSVVFDFAIAVQCFGCAVSYLVLIRDLMPTIVTYVPYIDEKHYPSFWLLVSTVLTIPLSFLKNLDSLKYSSILGLVAIFYMTILVIGHYFAGDIERQGQITLFPTSVTGVFSTFSIIVFAFTGHQNMFSIINEARDKSLTSLTKLVNFAIGISSLLFIAVGLSGYLTFGQDVDGNVILSYPNGLTTTIGRFCIVFMVTFSFPLMIHPARISINNIYHWVTTNYFDKDEANESTALLGNESQESQIAEDEEQGKTHLSHVVPFPHKHFVIVTTSLLIIGYLLAISIKSFALILAIVGASGSTSISFILPGLFGYKLIGSESDDPSTLEVAFKNLSLGLTFWGVAVMILCLYSSLTL

SEQ ID NO: 12224 - protein, 486 aa, Vibrio parahaemolyticus RIMD 2210633
MEMKTHYIDGAMYIGCSEEHFTTYNPANGEPLANIKQANQSDMEAAIESAKRGFEVWSAMTAIERSRILNKAVAILRERNDELAALEVADTGKPIQEAIAVDITTGADVIEYYAGLAPSLQGEQQPLNENQFFYTRREPLGICAGIGAWNYPIQIAMWKSAPALAAGNAMIFKPSEETPLTALKLAEIYSEAGLPDGVFNVVQGDYRVGQMLTAHPDIAKVSFTGESGTGKVVMGDSAKTLKQVTMELGGKSPLIVFDDAKLDDAVSAAMVANFYTQGEVCTNGTRVFVHESIYDDFVAQLKTRTEKLVVGDPLDENTQIGALISKEHESKVLSAIESAKASGATLLTGGYKVTDNGLQNGNFVAPTVFIDCDDSMSHVQQEIFGPVMSVLKFSEEAEVIERANDTDYGLAAGVFTQNLSRAHRVIHKIQAGICWVNAWGDSPAEMPVGGYKQSGIGRENGVETLKHYTQTKSVLVQLSDFESPYA

SEQ ID NO: 12225 - protein, 500 aa, Magnaporthe grisea 70-15
MISRPVLYAITMAMSAMTASAGPCSSDPCAALSAAGLQDPILRPNSTAYQDRINTLWSASARLAPACIVTPKDANEVALVLKALQKTPKAKFAIRGRGHSHWAGGDNVDGGVQIDLSLHFVGVTYNPDTKLASVLPASRWGTVFEELERQHGVAVVGGRDGNLGIGGFLTGGGNSFHTAKYGFGCDNVVNAEVVLADGRIVNVNKDENADLFKALKGGWGNFGIVTRFDLFTFPSSPVWGGLRVATLSQGAAVADSMVNFTANYHKNRGSAYLINWTYSPSMGKDPVISLFLVDTEGVEKGPAFAEALKIPEIMDALSVNRLDNLVDTYALPAGKRHVWYTLTFANDARVVNKAAELNTVFVADLLKVVPAEQLGTQLLVQPMPKIFFEHGVEKGGNVMGMDRVDGDSLQLLIACTVETAEQEKFLHERSAKLKDDVAAFAKSIGALRDWEYLNYADPTQDPFDSYGAANVAFLKQVSAKYDPTGFFQKQQGGGFRLPKA

SEQ ID NO: 12226 - protein, 141 aa, Neurospora crassa
MQNSMSQAYAAPPSIPNTSTEKPHYDAPTAATAGTTYPQADPTTGATAAAGTTPATNRPTTASTYGNEKSVATTPAVTKTRFGASDIILFILAIFIPPLAVFLDRGFKVDFWINILLTILAWFPGVIHAWYVLFRHPTGRD

SEQ ID NO: 12227 - protein, 397 aa, Synechococcus elongatus PCC 7942
MAANLLEQLRGMTVVVADTGDIQSIATFTPRDATTNPSLITAAAQMPQYQSIIDDTLRQVRTELGAEAPVEAIVAEAIDELFVAFGLRILEIVPGRVSTEVDARLSYDTEATIAKARKLIGLYERAGIRRDRVLIKIASTWEGIRAAEVLEKEGIHCNLTLLFGFHQAVACAEAGVTLISPFVGRILDWYKKESGRDAFPGAEDPGVQSVTQIYNYYKKFGYATEVMGASFRNISEIIELAGCDLLTISPGLLEELRQTEALLERKLDPAIAESLELEQIHLDRDRFAELHQADRMANEKLDEGIRGFCKAIDTLEGLLKQRLAVLEGKAVFHHAAHEVFSVCDLDGDGFITREEWLGSDAVFDALDLNKDGKLNEEDLLAGLGATLQMAGRAVATV

SEQ ID NO: 12228 - protein, 372 aa, Bacillus subtilis subsp. subtilis str. 168
MEEKQHYSPGLDGVIAAETHISYLDTQSSQILIRGYDLIELSETKSYLELVHLLLEGRLPEESEMETLERKINSASSLPADHLRLLELLPEDTHPMDGLRTGLSALAGYDRQIDDRSPSANKERAYQLLGKMPALTAASYRIINKKEPILPLQTLSYSANFLYMMTGKLPSSLEEQIFDRSLVLYSEHEMPNSTFAARVIASTHSDLYGALTGAVASLKGNLHGGANEAVMYLLLEAKTTSDFEQLLQTKLKRKEKIMGFGHRVYMKKMDPRALMMKEALQQLCDKAGDHRLYEMCEAGERLMEKEKGLYPNLDYYAAPVYWMLGIPIPLYTPIFFSARTSGLCAHVIEQHANNRLFRPRVSYMGPRYQTKS

SEQ ID NO: 12229 - protein, 317 aa, Desulfitobacterium hafniense DCB-2
MAPALAAGCTVVARGSEVAPLSLIELFKCLQDAGIPKGVANSIQGPAAVTTAAMMKHPAVRVVSFTGSTPVGRSLMRQAADGVIRLALELGGNAPFIVFADADIEKAVEGAMIAKFRNNGQSCIGANRFYVHERIYDKFTALFAEKILRMKIGNPTEEVDLDLGPMVNLKDKARIESLIREAEALGAKPLVPKAEVPAEGYYVPPVILENVPESAALAREELFAPVAPLFKFADENEVIEKANSSDMGLAAYVYTNDLSRSIRVTESLKFGIIGLNNALPSVAYAPMGGVKQSGIGREGARIGLEEFMDVKYVATEI

SEQ ID NO: 12230 - protein, 477 aa, Acinetobacter sp. NCIMB9871
MNYPNIPLYINGEFLDHTNRDVKEVFNPVNHECIGLMACASQADLDYALESSQQAFLRWKKTSPITRSEILRTFAKLAREKAAEIGRNITLDQGKPLKEAIAEVTVCAEHAEWHAEECRRIYGRVIPPRNPNVQQLVVREPLGVCLAFSPWNFPFNQAIRKISAAIAAGCTIIVKGSGDTPSAVYAIAQLFHEAGLPNGVLNVIWGDSNFISDYMIKSPIIQKISFTGSTPVGKKLASQASLYMKPCTMELGGHAPVIVCDDADIDAAVEHLVGYKFRNAGQVCVSPTRFYVQEGIYKEFSEKVVLRAKQIKVGCGLDASSDMGPLAQARRMHAMQQIVEDAVHKGSKLLLGGNKISDKGNFFEPTVLGDLCNDTQFMNDEPFGPIIGLIPFDTIDHVLEEANRLPFGLASYAFTTSSKNAHQISYGLEAGMVSINHMGLALAETPFGGIKDSGFGSEGGIETFDGYLRTKFITQLN

SEQ ID NO: 12231 - protein, 224 aa, Oceanobacillus iheyensis HTE831
MNEQDKLKKAVGEKAATMVKDGMKVGLGSGSTVYWMIRSLGERIQQDGLKIEGIPSSNQTATWAEEAGIPLTDFSNVKELDITIDGADEVDANNHLIKGGGAALFREKIIAQAAKEFVIIVDQSKVVETLGEFSLPVEVLPFSWQRTANEISKLGCVPTVRVHEEEPLVTDNGNYILDCPFKVIPHPDKLNKEIKSIVGVIETGLFIDMATTVIVGEKDNIYIK

SEQ ID NO: 12232 - protein, 287 aa, Staphylococcus epidermidis ATCC 12228
MAIQWYPGHMAKAKRQVSEQLKKVDVVFELVDARIPYSSRNPMIDDVIKQKPRVVILNKKDMTNLKELEKWEIYFKNEGFYPVAVDAKHGKNLKNVEVEAIKATQEKFDREKAKGLKPRAIRAMIVGIPNVGKSTLINKLAKRSIAETGNKPGVTKQQQWIKVGKSLQLLDTPGILWPKFEDEEVGKKLSLTGAIKDSIVHLDEVAIYGLNFMIKHDVSALKRHYNIDTHEDAEILDWFDAIGRRRGLLQKGNEVDYESVIELIINDMRNAKIGTYCFDILKEMKSE

SEQ ID NO: 12233 - protein, 113 aa, Glycine max
RICALQTHRPKVGRIEAMASRLLAAASSSSSSSSPLARLISSRRMAGAADHHGSTKVNMWQEPLNPGNWKEEHFVLTSLAMWGAIIYGGLKVFGGKKEVKTEAGSAPAAAPAH

SEQ ID NO: 12234 - protein, 255 aa, Brassica napus
GDIHGQYQDLLRLFEYGGYPPSANFLFLGDYVDRGKQSLETICLLLAYKIRYPSKIYLLRGNHEDAKINRIYGFYDECKRRFNVRLWKIFTDCFNCLPVAALIDDKILCMHGGLSPELDNLNSIREIQRPTEIPDSGLLCDLLWSDPDQKIEGWADSDRGISCTFGADKVAEFLDKNDLDLICRGHQVVEDGYEFFAKRRLVTIFSAPNYGGEFDNAGALLSVDESLVCSFEIMKPALASSSGHPLKKVPKMGKS

SEQ ID NO: 12235 - protein, 488 aa, Coptis japonica
MEVLSIAIVSFSFLLFLFFILRDSRPKNLPPGPRPSPIVGNLLQLGDKPHAEFAKLAQKYGELFSLKLGSQTVVVASSPAAAAEILKTHDKILSGRYVFQSFRVKEHVENSIVWSECNDNWKLLRKVCRTELFTPKMIESQSEIREAKAREMVKFLRGKEGEVVKIVEVVFGTLVNIFGNLIFSKDVFDLEDPTGGSVELKEHLWKLLDMGNSTNPADYFPIMGKLDLFGQRRAVAEVLQQIYDVWGVMLKERRGTKGSESKNDFVDVLLNAGLDDQKINALLMELFGAGTETSASTIEWAITELTKKPLVVSKIRLELVNVVGDNTVKESDLPHLPYLQAFVKETLRLHPPTPLLLPRRALETCTVMNYTIPKECQIMVNAWAIGRDPKTWDDPLNFKPERFLSSDVDYKGNDFELIPFGGGRRICPGLPLASQFSNLIVATLVQNFEWSLPQGMSTSELSMDEKFGLTLQKDPPLLIVLKARASNI

SEQ ID NO: 12236 - protein, 338 aa, Morganella morganii
MIMKALVLEKAGKIAIQDWQSNEVLGDDDVEIKIHTVGICGSDVHYYQHGRIGPFVVDEPMVLGHEASGVITAAGKNVKHLKVGDRVCMEPGIPDLQSPQSRAGIYNLDPAVRFWATPPIDGCLRESVIHPAAFTFKLPDNVSFAQGAMVEPLAIGMQSATKAGIKPGDIGLVIGAGTIGIITQSALAGGCSDVIICDVFDEKLKVAEKYQGLHAVNSKDQQALADKVRELTGGEGVNVLFECSGAKPVIASISDHIAPGGTAVLVGMPIDPAPLDIVAAQAKEVTFKTILRYANMYPRTIRLLSSGKLNVAPLLSATYKFKDSVEAYERAAEPVRLM

SEQ ID NO: 12237 - protein, 163 aa, Desulfitobacterium hafniense DCB-2
MALSEYMAALAEAKALGLTRQIGVSNFNIELTRQAIEAVGKGEIATNQIELSPYLQSRKLTAFLKEQGIAVTSYMTLAYGKVLKDPVLGQIAAKHHATVAQVALAWALQLGYAVIPSSTKRENLASNLLARDLKLDADDMALIASLERNGREVSPEGLAPVWD

SEQ ID NO: 12238 - protein, 119 aa, Vitis vinifera
MGSSGAVKLACVMVICMVVAAPAAVEATITCGQVASAVGPCASYLQKGGSVPAGCCSGIKSLNSAAKTTVDRQAACKCLKTFSGSIPGINFGLASGLPGKCGVSVPYKISPSTDCSKVT

SEQ ID NO: 12239 - protein, 161 aa, Pseudomonas aeruginosa UCBPP-PA14
MSDSLLSIPCTTIKGEQKTLADFGGKALLVVNTASKCGFTPQYQGLEALWEKYRERGLVVLGFPCNQFGKQEPGDEGEISQFCELNYGVSFPLFRKIEVNGAGAHPLFVSLKKRALGLLGSQGIKWNFTKFLIGRDGQVVKRYAPTTKPEELSSAIEALLE

SEQ ID NO: 12240 - protein, 119 aa, Vitis vinifera
MGSSGAVKLACVMVICMVVAAPAVVEATVTCGQVASALSPCISYLQKGGAVPAGCCSGIKSLNSAAKTTGDRQAACKCLKTFSSSVSGINYGLASGLPGKCGVSVPYKISPSTDCSKVT

SEQ ID NO: 12241 - protein, 490 aa, Glycine max
MESRTKSNPQLTRALCYANDGNQQGRSPSVIVIGGGMAGIAAARSLHDASLQVVLLESRERIGGRIHTDYSFGFPVDMGASWLHGVSNENPLASVIGRLGLPLYRTSGDNSILYDHDLESYGLFDMDGKQVPQELVAKVGEIFEAILQETDKIRQESSEDMSVLRGLSIVFDRKPELRLEGIAYKVLQWYLCRLEGWFAADTDAISLKGWDQEVLLPGGHGLMVRGYLPVVNSLAKGLDIRLGHRVTKVVRRYNGVKVTVENGKTFFADAAVIAVPLGVLKAKKILFEPKLPDWKEAAIADLGIGLENKIILHFENVFWPNVEFLGVVADTPYECSYFLNLHKATGRAVLVYMPSGQLAKDVEKMPDEAAVNFAFMQLKKIFPDASSPIQYLVSRWGSDINSLGSYSYDAVGKPHELYERLRVPVDNLFFAGEATSMSYPGSVHGAYSTGTMAAEDCRMRVLERYGEVDLFQPVMGEEGSMSIPLQISRL

SEQ ID NO: 12242 - protein, 122 aa, Brassica napus
MACLISPVMKLRRLSSADSRRFAYRNLSDDDMEDSVIRVVVGKEKKEFMVEPYVLEETPFRVLIGSAKDRTQSRFNRTGRVVWLDHVDSILFEHLLWLLRNDASSFSDMDVAEIIEFYAQDC

SEQ ID NO: 12243 - protein, 490 aa, Arabidopsis thaliana
MAIIVVTTIFILLSFALYLTIRIFTGKSRNDKSHKLYDYETEIARTKPTFRFLSPGQSEIFTADPRNVEHILKTRFHNYSKGPVGTVNLADLLGHGIFAVDGEKWKQQRKLVSFEFSTRVLRNFSYSVFRTSASKLVGFIAEFALSGKSFDFQDMLMKCTLDSIFKVGFGVELGCLDGFSKEGEEFMKAFDEGNGATSSRVTDPFWKLKCFLNIGSESRLKKSIAIIDKFVYSLITTKRKELSKEQNTSVREDILSKFLLESEKDPENMNDKYLRDIILNVMVAGKDTTAASLSWFLYMLCKNPLVQEKIVQEIRDVTSSHEKTTDVNGFIESVTEEALAQMQYLHAALSETMRLYPPVPEHMRCAENDDVLPDGHRVSKGDNIYYISYAMGRMTYIWGQDAEEFKPERWLKDGVFQPESQFKFISFHAGPRICIGKDFAYRQMKIVSMALLHFFRFKMADENSKVSYKKMLTLHVDGGLHLCAIPRTST

SEQ ID NO: 12244 - protein, 249 aa, Triticum aestivum
  misc_feature (29)..(29): Xaa can be any naturally occurring amino acid
NQPFYCQTQQPFPQTQQSFPLQPQQPFPXQAQQPFPQPQLPFPQQPEQIIPQQPEQIITQQPFPLQPQQAFPQQPQQPFPQPQQPIPVQPQQPFPQQSQQSQQPFPRPQQLFPELQQPIPQQAQQPFPQQSQQPFPQQPQQPFPLQPQQSFPQQPQQPFPQQPQQPFPLQPQQPFPLRPQQPFSQQPSILQPQQPQQPFLQPQQQLSQQLGQTISQQPQQPFPQQPHQPQQPYPQQQPSGSSLTSIGGQ

SEQ ID NO: 12245 - protein, 224 aa, Zea mays
MASSMLSSAAVVTSPAQATMVAPFTGLKSSAAFPVTRKANNDITSIASNGGRVSCMKVWPPVGKKKFETLSYLPDLTEVELGKEVDYFLRNKWIPCVEFELYHGFGYREHGSTPEYYDGSYWTMWKSPPCWKDWTLLRGLKGSPKMGKTENPNRFSYGKNSGFEKTTPQGSGGSFFFPPKKTTPNFPRGGFIFFCKKPPSKKKTPRRVFFLLSTGAGGVFFSHR

SEQ ID NO: 12246 - protein, 201 aa, Glycine max
  misc_feature (46)..(46): Xaa can be any naturally occurring amino acid
  misc_feature (164)..(164): Xaa can be any naturally occurring amino acid
MSGRVSGKVKWFNDQKGFGFISPDDGSDDLFVHQSQIKSDGFRSLXEGESVEFAIESESDGRAKAVDVTGPDGASVQGTRRGGDGGRSYGGGRGGGGGGYGGGGGYGGGGGYGGGGGYGGGGRGGGGGACYNCGESGHLARDCSGGGGGDRYGGGGGGGRYGGXGGGGRYVGGGGGGGGGGSCYSCGESGHFARDCPSSAR

SEQ ID NO: 12247 - protein, 507 aa, Populus tremula x Populus tremuloides
MACSASDLAPLLSSTVNSTEAATYLCSQFTSISNHLSDTSYAVNNTYLLFSAYLVFAMQLGFAMLCAGSVRAKNTMNIMLTNVLDAAAGGLSYYLFGYAFAFGSPSNGFIGRHFFGLGDFPSPQADYSFFLYQWAFAIAAAGITSGSIAERTQFVAYLIYSTFLTGFVYPVVSHWLWSGDGWANPAKSDNNLLFGSGAIDFAGSGVVHMVGGIAGLWGALIEGPRIGRFDHNGRSVALRGHSASLVVLGSFLLWFGWYGFNPGSFLIILKSYGGGAGGYYGQWSAVGRTAVTTTLAGSTAALTTLFGKRLLSGHWNVIDVCNGLLRGFAAITAGCSVVEPWAAIICGFVAAWVLIGCNKLAEKLQYDDPLEAAQLHGGCGMWGLLFTGLFAKKAYVNEVYSNKPGRPYGLFMGGGGKLLAAQIIEILVIVGWVSATMGPLFYGLHKLKLLRISSEDEMAGMDLTRHGGFAYAYDAEDDVSGKPSFMMRKVLPANNTTPNENSPSINV

SEQ ID NO: 12248 - protein, 486 aa, Pseudomonas putida
MKEIKHFINGAFVGSASGRTFEDINPVNGQVIGRVHEAGRAEVDAAVKAARAALKGPWGKMTVAERADILHRVADGITARFDEFLEAECLDTGKPKSLASHIDIPRGAANFKVFADLLKNVANEAFEMATPDGAGALNYGVRRPKGVIGVISPWNLPLLLMTWKVGPALACGNCVVVKPSEETPLTATLLGEVMQAAGVPAGVYNVVHGFGGDSAGAFLTEHSDVDAYTFTGETGTGETIMRAAAKGVRQVSLELGGKNAGIVFADCDMDKAIEGTLRSAFANCGQVCLGTERLYIERPIFDAFVARLKAGAESLVIGPPDDASSNFGPLVSLKHREKVLSYYQQAVDDGATVVTGGGVPEMPAHLAGGAWVQPTIWTGLSDNSAVVTEEIFGPCCHIRPFDTEEEAIELANSLPYGLASAIWTESSSRAHRVAGQIEAGIVWVNSWFLRDLRTAFGGSKQSGIGREGGVHSLEFYTELKNICVKL

SEQ ID NO: 12249 - protein, 336 aa, uncultured marine gamma proteobacterium EBAC20E09
MIRNLLINLFFLIPVWLIRLVALPFRDVKRNTIFDPQAKFFLALIPKFEIHLIGDQDISKIRNQIHEKRNNLRLSRKIKKNIKTIDHLINQNNSLSLREYVPYKIDNSNVILFFHGGGYVLNSVDTHHDMVCYFSEKLRTRIYSLEYSLAPENKFPKARDESLLALRWLIEQGHNPANISLCGDSAGAHLAVSLSQHLKNNENIKLHSQCLIYPMCDPKCDSESHKIFKHGYLLTHEAMKWFWQKFSSSKLDIEDSTFNLMIEDTTIQQPKTILVTAGFDPLVDEAEEFAFLLHENDNTVIQLHYPSLFHGFASMTRLKSAKLAVDDFLREYKEIL

SEQ ID NO: 12250 - protein, 110 aa, Glycine max
  misc_feature (34)..(34): Xaa can be any naturally occurring amino acid
  misc_feature (82)..(82): Xaa can be any naturally occurring amino acid
KIYCPNVSTVNHAGAGMVAPFTGLKSMADFPTRXTNNDITSIASNGGRVQCMHVWPPDGKNKVDTLPYLPDLDDAQLANEGXYLHTKGWIPSLEYELEHGNVYPEHNMSP

SEQ ID NO: 12251 - protein, 105 aa, Candida albicans SC5314
MNQQNARDIELREQDRWLPIANVARIMKNTLPPTAKVSKDAKECMQECVSEFISFITSEASDKCLKEKRKTINGEDILYSMYDLGFENYAEVLKIYLAKYREARK

SEQ ID NO: 12252 - protein, 224 aa, Oryza sativa (japonica cultivar-group); identical to SEQ ID NO: 275

SEQ ID NO: 12253 - protein, 132 aa, Zea mays
  misc_feature (29)..(29): Xaa can be any naturally occurring amino acid
  misc_feature (57)..(57): Xaa can be any naturally occurring amino acid
MLLSHFQQIRTFIQMRTNLKVVDNSGAKXVMCIQSLRGKKGARLGDMIIGSVKEAQXPRGKVKKGDVVYGVVVRAAMKKGRSDGSEVQFDDNEVVLVNKKGELIGTRVFGPVPHELRKKKHLKILALAEHIV

SEQ ID NO: 12254 - protein, 275 aa, Bordetella pertussis Tohama I
MAQVPVLKLNDGNAMPQLGLGVWQVPNDQAAASVKAALAAGYRSIDTAAIYGNEAGVGEGLRAAGVARKDLFVTTKLWNDRHGYDEAQRAMDESLRKLGLAYVDLFLIHWPVAGSDKFVDAWRAMVAMKEDGRARSIGVSNFTIANLRRLVDETGVVPAVNQVELHPGFAQRELRAFHAEQGIATESWSPLGQGAVMHDATLAGIAARHGKSAAQVTLRWHLQNGLIVIPKSVTPARIQANIDVFDFELSADEMADIDALPEGPRLGPDPATFTG

SEQ ID NO: 12255 - protein, 223 aa, Oryza sativa (japonica cultivar-group)
MAPAAAMAILLLALLMPATLCSRSGPPSSKHGHGGHAKRAPPPASPVVPVAPQAAALVRATCNSTAYYDVCVSALAADPSSTTADVRGLSAIAVSVAAANASGAAQAAAALANGTAPLAAAAAGDGTVQALLRACAGKYGDARDALAAAKESMGQQDYDLATVHVSAGAEYPQVCKALFRRQRPGAYPAELAAREEALNKLCSVALDIIALLTSSPASNNNNS

SEQ ID NO: 12256 - protein, 412 aa, Zea mays
VICLLLAPHSSLPSLPVPLLLLPSPASGVDVTAVLSAFPNFADFARLLASTPVASELSGRSSLTLLAVPNANLPQSPSAFVASAGADIADVLRYHVLLEYLSPFDLARLSPSGKLVTTLFQTTGRAPSDFGAVNLTVGGNSTVVVRSPAPSPGSNATVLGAVTAVPYNLSVLAVGGLIIPSGFDLAASESRPPPPVNITRVLTDARGFNVAASMLQASGVASEFEADEHGAGITVFVPTDDAFAGLPATDRLQSLPAERKAVVLRFHVLHSYYPLGSLESIVNPVQPTLATEHTEAGHFTLNITRVNGSIAIDTGIVQASITRTVFDQNPVAVFAVSKVLLPKEMFGRGDSGNTAMAPPSVAMAPRDAGSEKTPQTRLSSPPDLHSEDSESSASLLTAKGTWWCIGLMYLQL

SEQ ID NO: 12257 - protein, 182 aa, Triticum aestivum
  misc_feature (145)..(145): Xaa can be any naturally occurring amino acid
APPERPAVDGVLSDLTCDSDGKVDQFIGGRSSLPLHELPAHGTRGYYLGMFLGGAYQEALGGLHNLFGGPSVVRVSQSDGPHCFAVTRAAPGPSCADVLRAMQHEPEVMFEVLKQRTTDDGATAAALARAFGSMPYLSFDAEEAXAMSGAESSGMSSDSEGSAAGAAEDDDEEWEFMRGLTV

SEQ ID NO: 12258 - protein, 342 aa, Methanosarcina mazei Go1
MTKTAAVIKGDGVGPELVDAMLKVAEASGTDVEFVMCEAGAGWWEEHGGNSLIPEETWQILDSSDACFKGPTTTPGGIGSPRSVAVSIRRKYDLYANVRPIKTFPNSSAPLGDVEMVCVREGTEGLYIGEEIQLTDDVSIAIRKITRTASSKIARYAFEDAKKRGYDTVVPIHKSNILKLTCGSFLEEVEKVAHDFPDIEVWPYHIDNIAQQLIKNPQIFNKKVLLSTNLFMDVISEECSALVGSIGLIYSANIGDNFAMFEPAHGSAPKYAGLDKVNPVATVLAGAWMLDYLGEKDKSDAIFKATERVISEGKYVTYDLGGSAKLSQMADEIAKYTEEILK

SEQ ID NO: 12259 - protein, 443 aa, Vibrio parahaemolyticus RIMD 2210633
MSYVFHRHCHATLPIIDKGEGVYLFDKQGKQYLDACGGAAVSNLGHSHQAVKKAMLEQLERVPFAHTGFFTSDSSERLAELICQHMPEQFNHVYLVSGGSEAVESALKMARQYFVESGKPEKKQFIARQQSYHGNTLGALAVGGNEWRREPFKPILHPSHHIAPCYAYRYQQSHESELDYSLRAANELEAKILELGADNVMAFVAEPIVGATAGAVPATQGYFKRIREICDQYDVLLILDEVMCGVGRSGSFFAFEQEEAEPDLVCMAKGLGAGYQPIGAVVANDRVYQAIADGSGFFQHGHTFMAHPVACAAAVATIQTIFQDDLLTAVNRQSALLRNELASALAHLPYIGDIRGKGLFFGIELVADKESKSPLSKATLADKRIKQRAMENGLMCYPMGGTIDGVNGHHILLAPPFIIQSHHIDELVGKLSLTLKEVAEIWK

SEQ ID NO: 12260 - protein, 283 aa, Methylococcus capsulatus str. Bath
MQKEGFLESAYGVRMPGIVYGTAWKKDRTAALVEQAVSLGFRGIDTACQPKHYDEPGVGAGLAACTNAGLERADLYLQSKFTPVDGQDPERMPYDPKASLAEQVARSFESSLKNLRTSYLDCLILHSPLSKEKDTLDVWRAMETVFDGGGARQLGISNCYRPELLERLYRWSRVKPAVVQNRFYAETRYDREIREFCRQNRIVYQSFWTLTANPSILAHATVRALAATHGRTPAQIFFRYLTQIGVVPLTGTASEAHMREDLAIFEFELTPDQCAAVSGLLRT

SEQ ID NO: 12261 - protein, 365 aa, Gibberella zeae PH-1
MAHTDVTEVDHTPTEHCEERNETGKPSKDLSASMAHIQIRQSSAEKHGWDEPVPESAPAVSFGHNLERNQESKMAGFPAGVVNIVNGCGAEAGSAITAHPGIDKIAFTGSTITGKTIMKKASETLKSVTLETGGKSPLIVFDDADFEQAVKWSNCGIMGLGNMGQICTATSRIFVQDTIYEKFLEAFHEQVKSSTVIGDPFDENTTHGPQVSKAQYEKILSLIESGKSEGAGLLTGGARSGDKGFYIQPTVFRDVKPNMKIVREEIFGPCFVIAPFSTEADAIERANDTEYGLGAAIFTENLRKAHRVAAGVQAGTVWIDSSQDTHWGVPFGGYKKSGIGRELGSYALSAYTQVKAVHATSQLYG

SEQ ID NO: 12262 - protein, 174 aa, Triticum aestivum
MAPAVMASSATTVAPFQGLKSTAGLPVSRRSSGSLGRVSNGGRIRCMQVWPIEGIKKFETLSYLPPLSTEALLKQVDYLIRSKWVPCLEFSKVGFVFREHNSSPGYYDGRYWTMWKLPMFGCTDATQVLNEVEEVKKEYPDAYVRVIGFDNLRQVQCVSFIAFRPPGCEESGKA

SEQ ID NO: 12263 - protein, 212 aa, Oryza sativa (japonica cultivar-group)
MDEEEHEVYGQEIPEDGDMDGADVDMASGGDDAAKLQELDQMKRRLKEMEEEAAALRDMQAKVAKEMQGGDPSASTAEAKEQVDARSVYVGNVDYACTPEEVQQHFQACGTVNRVTILTDKFGQPKGFAYVEFLEQEAVQEALNLNESELHGRQIKVAPKRTNVPGMKQRPPRGYNPYHGYPYRSYGAPYFPPYGYGRVPRFRRPMRYRPYF

SEQ ID NO: 12264 - protein, 216 aa, Oryza sativa (japonica cultivar-group)
MDEEEHEVYGQEIPEDGDMDGADVDMASGGDDAAKLQELDQMKRRLKEMEEEAAALRDMQAKVAKEMQGGPPGGDPSASTAEAKEQVDARSVYVGNVDYACTPEEVQQHFQACGTVNRVTILTDKFGQPKGFAYVEFLEQEAVQEALNLNESELHGRQIKVAPKRTNVPGMKQRPPRGYNPYHGYPYRSYGAPYFPPYGYGRVPRFRRPMRYRPYF

SEQ ID NO: 12265 - protein, 324 aa, Clostridium thermocellum ATCC 27405
MYEIYALQKGYKRMNPYKRIALKALSHWGRNLKKNYRVYRRFTNVVSVCTGHGCRIADLEVAAGDRNIPVRLFHPDDPALGVLIFFHGGGWVTGNVDSYTHVCSNMANQTKNIVVSVDYRLAPEHPFPSGLEDCYDATREFFKNPGLLNCKADDITLIGDSAGGNLAAAVSLMARDRGEFLPKRQILIYPSTYNDHSENSPFPSIRENGTGYLLTSEEIQNYMDMYAPNIEDRQSPYLAPLLARDLSNQPDTLIITAEYDPLRDEGEAYGMRLKEYGNNVKMYRIKGALHGFFSIPWKSQHVSRSFEIINWFLNSYNGQSEELL

SEQ ID NO: 12266 - protein, 123 aa, Triticum aestivum
  misc_feature (68)..(68): Xaa can be any naturally occurring amino acid
SKDDSGPCYTYPQRGGAIHTGGHIAIKAHTCQVVEACTYKTAKHGHAMCDFVAIDIFNRKKLDDIVPXCHNCDLPHVVRLDNHLIDITEDGYASLLTESGHTNDDLQLPTDDAVLGQIREWMC

SEQ ID NO: 12267 - protein, 403 aa, Sinorhizobium meliloti
MLTQKTKDIVKATAPVLAQHGYAIIQHFYKRMFQAHPELKDIFNMAHQERGEQQQALARAVYAYAANIENPESLSAVLKDIAHKHASIGVRPEQYPIVGEHLLASIKEVLGDAATDEIISAWAQAYGNLADILAGMESELYGRSEERAGGWAGWRRFIVREKNPESDVITSFVLEPADGGPVADFEPGQYTSVAVQVPKLGYQQIRQYSLSDSPNGRSYRISVKREDGGLGTPGYVSSLLHDEINVGDEPKLAAPYGNFYIDVSATTPIVLISGGVGLTPMVSMLKKALQTPPRKVVFVHGARNSAVHAMRDRLKEASRTYPDFKLFIFYDEPLPTDIEGRDYDFAGLVDVENVKDSILLDDADYYICGPVPFMRMQHDKLLGLGITEARIHYEVFGPDLFAE

SEQ ID NO: 12268 - protein, 431 aa, Cupriavidus necator
MTRTEQIQALQKDWDTNSRWKGIKRNFTAEDVVRLRGSVQVEHTLARPGSEKLWTLLHTEPFVNSLGALSGNQAMQQVKAGLKAIYLSGWQVAGDANLAGEMYPDQSLYPANSVPQVVKPINNTFQPPDQIQWSEGKGDTDFFAPIVADAEAGFGGVLNAFGLMKSMIEAGAAGVHFEDQLASVKKCGHMGGKVLVPTREAVAKLTSGGLGADVLGVPTLVIARTDGEAADLLTSDVDDNDKPFCTGERTVEGFYRVRNGLEQSISRALAYAEVADLVWCEIGKPDLEFAKKFAEAVHAKFPGKMLAYNCSPSFNWKKNLDDATIAKFQRELGAMGYKFQFITLAGFHSLNYSMFNLAYGYARNQMSAFVELQEAEFKAAEKGFTAVKHQREVGTGYFDAVTQTIEGGQSSTTALKGSTEDEQFFEDKKVA

SEQ ID NO: 12269 - protein, 501 aa, Sinapis alba
MSTNKKTIVWFRRDLRIEDNPALAAAAHEGSVFPVFIWCPEEEGQFYPGRASRWWMKQSLAHLRQSLKALGSELTLIKTHSTVSAILDCVRATGATKVVFNHLYDPVSLVRDHTVKEKLVERGISVQSYNGDLCMSPGRYTVKRANLLLVLILTGKKCLDMSVESVVLPPPWRLMPLSAAETVWACSVEELGLENEAEKPSNALLTRAWSPGWSNADKILNEFIEKQLIDYAKNSKKVVGNSTSLLSPYLHFGEISVRRVFQCARMKQIIWARDKNGEGEESADLFLRGIGLRDYSRIICFNFPFTHEQSLLSHLRFFPWDADVDKFKAWRQGRTGYPLVDAGMRELWATGWMHNRIRVIVSSFAVKFLLLPWKWGMKYFWDTLLDADLECDIIGWQYISGSLPDGHELDRLDNPAIQGAKYDPEGEYIRQWLPELARLPTEWIHHPWDAPLTVLKASGVELGTNYAKPIVVIDTARELLTKAISRTREAQIMIGACGDEM

SEQ ID NO: 12270 - protein, 191 aa, Zea mays
  misc_feature (36)..(36): Xaa can be any naturally occurring amino acid
  misc_feature (50)..(50): Xaa can be any naturally occurring amino acid
  misc_feature (58)..(61): Xaa can be any naturally occurring amino acid
  misc_feature (68)..(68): Xaa can be any naturally occurring amino acid
  misc_feature (83)..(83): Xaa can be any naturally occurring amino acid
  misc_feature (85)..(85): Xaa can be any naturally occurring amino acid
  misc_feature (91)..(91): Xaa can be any naturally occurring amino acid
PREAIDRVYFSETPVEVVKEHDQELSKLGAALIAMXGHVAQAFTLLKSSXEAQSVVAXXXXDKNVWDXVLKNERVMEFYKSHXQXLVNTFXEETGSTDSVESPEKFEEASPEYALPTASPLSDFVDSAKKTMMEMVDNITNFFQDMFHNPAEAEAGPGSSSKKPSFAEMAAGGSFMALAMAVILVVLFKRA

SEQ ID NO: 12271 - protein, 115 aa, Musa acuminata
PGREDKTLPREEGRLPDATKGSDHLRDVFGHMGLSDQDIVALSGGHTVGRCHKERSGFEGAWTSNPLIFDNSYFKELLSSEKDDLIQLPSDKALLTDPVFRPLVEKYAADVNACS

SEQ ID NO: 12272 - protein, 376 aa, Mycobacterium tuberculosis H37Rv
MTKSLPGVADLRLGANHPRMWTRRVQGTVVNVGVKVLPWIPTPAKRILSAGRSVIIDGNTLDPTLQLMLSTSRIFGVDGLAVDDDIVASRAHMRAICEAMPGPQIHVDVTDLSIPGPAGEIPARHYRPSGGGATPLLVFYHGGGWTLGDLDTHDALCRLTCRDADIQVLSIDYRLAPEHPAPAAVEDAYAAFVWAHEHASDEFGALPGRVAVGGDSAGGNLSAVVCQLARDKARYEGGPTPVLQWLLYPRTDFTAQTRSMGLFGNGFLLTKRDIDWFHTQYLRDSDVDPADPRLSPLLAESLSGLAPALIAVAGFDPLRDEGESYAKALRAAGTAVDLRYLGSLTHGFLNLFQLGGGSAAGTNELISALRAHLSRV

SEQ ID NO: 12273 - protein, 384 aa, Methanococcus maripaludis S2
MLNNSVKHLKMDNMENKIPMRRMVHKIIYECNIVLLVVDARDPETTRNRALEEYTIEKNKKLIYVINKSDLVPKKILEKWKNKFKSENPDSSVVFVSAKEKLGTKMLRDEIKTYLNSNNIKYGQVGIVGYPNVGKSSIINALTGKKSARSGLTAGLTVGEQWVKLTKDIKLLDSPGIIEPKDEDELVISGALRYEKADDIISPALKILNRIHTFDNTILKEYYGFEIGEEINIELLEKIGTKLNFLTKDGKIDIDRTSKSIIREFQNGKLNYHRMNLKKYEQKRTKNIDFITKHLKDFPFINDADQIILHLENINELGKLNTRPVIGIKELDDAFVIISFSEKSRDTGRKKVEELARTSDIELYSLGDGRVGKHRIYVGVGEKR

SEQ ID NO: 12274 - protein, 282 aa, Mycobacterium tuberculosis H37Rv
MTGESGAAAAPSITLNDEHTMPVLGLGVAELSDDETERAVSAALEIGCRLIDTAYAYGNEAAVGRAIAASGVAREELFVTTKLATPDQGFTRSQEACRASLDRLGLDYVDLYLIHWPAPPVGKYVDAWGGMIQSRGEGHARSIGVSNFTAENIENLIDLTFVTPAVNQIELHPLLNQDELRKANAQHTVVTQSYCPLALGRLLDNPTVTSIASEYVKTPAQVLLRWNLQLGNAVVVRSARPERIASNFDVFDFELAAEHMDALGGLNDGTRVREDPLTYAGT

SEQ ID NO: 12275 - protein, 640 aa, Zea mays
  misc_feature (61)..(61): Xaa can be any naturally occurring amino acid
  misc_feature (124)..(124): Xaa can be any naturally occurring amino acid
  misc_feature (199)..(200): Xaa can be any naturally occurring amino acid
HTGDWKIDESPVDGKKFDRQALEELSKEGVTLMMSDSTNVLSPGRSISESVVAGSLLRHIXGTTRPKGRVITTQFASNIHRIGSIKAAADLTGRKMVFVGMSLRTYLEAAFKDGKAPLDPSTLXIKVEDMDAYAPKDLLVVTTGSQGEPRAALNLASYGGSHALKLSKEDVLLYSAKVIPGNETRVMKMMNRLTDLGPXXIMGKDSGLHTSGHAYREELEEVLRIVKPQHFLPVHGELLFLKEHESLGRSTGIRHTTVIKNGEMLGVSHLRNRRVLSNGFVSLGKEDLQLMYSDGDKAFGTSTDLCVDERLRIASDGIIFVSMEIFRPQKEHGLAQSGLKGKFKITTRCLWLDNGRLLDALYKAAHAALSSCPVNCPLSHMERMVAEILRKMVRKYSGKRPDVIAVATENTTAGFSEHLDAKASGNFGPSSATSHLSRSPATTLEGSYKTHPDNPEVDAEETLPEAARTAPDDATTSSNGEAFFSSDLHQPKTLEHFWESFKSPTAVKIARIVNGGKKQNLGKIGIMGKDSSIQSAPAPAKSSKKNKWKPEEIKSLIQMRGEMNERFQSVKGRMVLWEEISDNMLKQGISRTPAQCKSLWTSLVQKYEESKKDAESMKTWPYFSAMDRILSQQGEMATKG

SEQ ID NO: 12276 - protein, 478 aa, uncultured bacterium 580
MKPKTNIVWLKRDLRLTDHAPLYEATCRDEQFLVLYIYEPSLINDSHTDERHWRFIQQSLSVMEKILAKQSKQLSIAYGEADQIFSEIINQHEITNVFSHEETGLKLTYERDKKLKKIFNAKKIQWHEYQTNAVIRGLNNRKTWEKQWNKVMREEIKTINLAEANIISHNFPNYSIPKFRNDLNYQPGGCLPGQKEMHDFFETRGQDYFKFISKPDRSRTSCSRLSPYIAYGNLSMREVYQTLLKSWNKTGWRRSMAALSSRLHWHCHFIQKYESEIDIEDLPINRGYKDFPYKVINCEHEDFLAWANGETGYPLIDASMRALKKTGYLNFRMRAMVVSFACHYFMIHWKLVAKHLATLFLDFEPGIHYPQIQMQAGVTGINTIRIYNPSKQLQDHDPDTKFIRDWIDELSDQDKEYILGLPDDNFDLFSNSQNFYPTPAYDFFERTKYAKNLLWQWKKSSLVKSYNSKILSRHVKVR

SEQ ID NO: 12277 - protein, 139 aa, Triticum aestivum
  misc_feature (28)..(28): Xaa can be any naturally occurring amino acid
  misc_feature (38)..(38): Xaa can be any naturally occurring amino acid
  misc_feature (66)..(66): Xaa can be any naturally occurring amino acid
  misc_feature (83)..(83): Xaa can be any naturally occurring amino acid
  misc_feature (97)..(97): Xaa can be any naturally occurring amino acid
NCKTFTAVEPIPGLLEWRIIYVGSAKNXEYDQVLEEFXIGPVQEEATMKFTVECPPPDFTRIPRDXLICVTAIIITVSYRAQXFIRVGYYVHNVLNXTLPEEERPNAEPATLIAHTRRTILTDKPRITKFRINWGEHRE

SEQ ID NO: 12278 - protein, 188 aa, Medicago sativa
AWHSAGTFDSKTKTGGPFGTIKHQAELAHGANNGLDIAVRLLEPLKEQFPIISYADFYQLAGVVAVEITGGPEVPFHPGREDKPEPPPEGRLPDATKGSDHLRDVFGKAMGLSDQDIVALSGGHTIGAAHKERSGFEGPWTSNPLIFDNSYFKELLGGEKEGLLQLPSDKALLSDPVFRPLVEKYAAG

SEQ ID NO: 12279 - protein, 420 aa, Glomerella cingulata
MTTNGSDKPQVQPCRYKVGKTLGAGSYSVVKECVHIDTGRYYAAKVINKRLMAGREHMVRNEIAVLKKVSMGHQNILTLVDYFETMNNLYLVTDLALGGELFDRICRKGSYYESDAADLIRATLSAVAYLHDHGIVHRDLKPENLLFRTPEDNADLLIADFGLSRIMDEEQFHVLTTTCGTPGYMAPEIFKKIGHGKPVDVWALGVITYFLLCGYTPFDRDSDFEEMQAILNADYSFTPFDYWRGVSEHAKDFIRKCLTIDPKKRMTAHEALQHPFVAGYLNGEGEGQNLLPTVKKNFNARRTLHAAIDTVRAINKLREGQQNLMDGAKSREPDRGLKSPPNAKKDDSAISMGNTNHKDSGYGTQPEADNQNDVCHDRCGTTPTSVPASLRVRAVSRTRSLRQAKDCGAVPQCDDSLEAV

SEQ ID NO: 12280 - protein, 129 aa, Bifidobacterium longum bv. Infantis
MPTGRVRWFDAAKGYGFITSEEGKDVFLPAQALPTGVTTLRKGAKVEYSVVDGRRGPQAMDVRLIASAPSLVKATRPKADDMAAICEDLIKMLDAAGNTLRRHRYPSAADSKKLATLLRAVADQFDVQD

SEQ ID NO: 12281 - protein, 486 aa, Mycobacterium avium subsp. paratuberculosis str. k10
MADPPALVQTYQLYIDGQWVEPQDGRYDDLSPSTEAVIATAPDASVAQVDDAIAAARRAFDSGPWGRMSAEQRARCLNQLGEALTKHADDFFALSQTEWGCIGNERIMQIDGAGFMSLHAAQLATQLVDQEVAGISAGTTLLRHVPLGVVAVLTPWNFPHCLNVMKLNHALAAGNTVVLKPSPLTPLAGLALARLIDEHTDIPPGVVNVVTPSGVEAAKLLTTDPRIDMVSFTGSSAVGRQVMSAAGDTIKRILLELGGKSASIVLDDANVTDEMLEQMLFQSCSLHAGQACILHSRLLLPDSLHDDVVDRLAALAREVKVGDPTDPDVQMGPLISAAQRDRVEAHIAGARSDGATLVTGGGRPAGLDVGYYVEPTILSGVEPNSTIAQEEVFGPVLSVLRYRDDDDAVAIANNSRYGLSGAVWGDDVDRAVGVARRIRTGQIAVNGISPAGAPFGGFRLSGLGREGGGIGGLHQYMEPMAIGVPA

SEQ ID NO: 12282 - protein, 219 aa, Prunus armeniaca
MEKTECSEAENFGSVTTSLEPQATAKRKKAKSKNQRRFSDEQIRLLESIFEADSKLEPRRKVQVARELGLQPRQVAIWFQNRRARWKSKQIEQDFRTLRADYDNLASRFESLKEEKQSLLMQMQKLNELVGKPSQGLEGNIMVDGSRLQEELEPRGVIQSHKNNTSNDVGCHGDEIHELLSMAHVDASSLSPQDWHRFEPSILFDPSRFTSSHWLNFWT

SEQ ID NO: 12283 - protein, 214 aa, Oryza sativa (japonica cultivar-group)
MEYYEQEEYATVTSAPPKRPAGRTKFRETRHPVYRGVRRRGPAGRWVCEVREPNKKSRIWLGTFATAEAAARAHDVAALALRGRGACLNFADSARLLRVDPATLATPDDIRRAAIELAESCPHDAAAAAASSSAAAVEASAAAAPAMMMQYQDDMAATPSSYDYAYYGNMDFDQPSYYYDGMGGGGEYQSWQMDGDDDGGAGGYGGGDVTLWSY

SEQ ID NO: 12284 - protein, 644 aa, Zea mays
MISARTAAASPASLWKQGGRSEGGGSCDGCRTYRNTLRRAAAAKVRALPSRAVEAVKMGSAAEMEQEEAEVAAAAAGVVVEDHYGEDSATEELPILPWAFSVASGYTLLRDPHHNKGLAFMEKERDAHHLRGLLPPAVVPQELQIKKIMHNLRQYQVPLQRYMAMMDLQERNERLFYKLLIDNVEELLPVVYTPTVGEACQKYGSIFRQPQGLYVSLRDKGKVLEVLRNWPHRNIQVICVTDGERILGLGDLGSQGMGIPVGKLALYTALGGVRPSACLPITIDVGTNNEKLLNDEFYIGLRQKRATGEEYHELMEEFMAAVKQIYGEKVLIQFEDFANHNAFNLLAKYSKSHLVFNDDIQGTASVVLAGLLAALKVVGRTLAEHTYLFLGAGEAGTGIAELIALEISKQTSAPIEECRKKIWLVDSKGLIVDSRKNSVQSFKKPWAHEHEPLTTLYDAVQSIKPTVLIGTSGVGRTFTKEVVEAMASFNERPIIFSLSNPTSHSECTAEEAYNWTQGRVIFASGSPFGPVEYDGKVFVPGQSNNAYIFPGFGLGLVISGAIRVHEDMLLAASEALAAQATQENFDKGSIFPPFTNIRKISARIAAAVAAKAYELGLATRLPPPRDLVKYAQSCMYTPVYRNYR

SEQ ID NO: 12285 - protein, 262 aa, Thermotoga maritima MSB8
MSWYPGHIEKAKRQIKDLLRLVNTVVEVRDARAPFATSAYGVDFSRKETIILLNKVDIADEKTTKKWVEFFKKQGKRVITTHKGEPRKVLLKKLSFDRLARVLIVGVPNTGKSTIINKLKGKRASSVGAQPGITKGIQWFSLENGVKILDTPGILYKNIFSEDLAAKLLLVGSLPVERIEDQRIFERAFEIFARSIGIESSFSEFFEDFARKRGLLKKGGVPDIERALMLFFTEVAQGKAGRVSFERPEDITPVQQEQTRGV

SEQ ID NO: 12286 - protein, 404 aa, Escherichia coli
GKKITLQNGKLNVPENPIIPYIEGDGIGVDVTPAMLKVVDAAVEKAYKGERKISWMEIYTGEKSTQVYGQDVWLPAETLDLIREYRVAIKGPLTTPVGGGIRSLNVALRQELDLYICLRPVRYYQGTPSPVKHPELTDMVIFRENSEDIYAGIEWKADSADAEKVIKFLREEMGVKKIRFPEHCGIGIKPCSEEGTKRLVRAAIEYAIANDRDSVTLVHKGNIMKFTEGAFKDWGYELAREEFGGELIDGGPWLKVKNPNTGKEIVIKDVIADAFLQQILLRPAEYDVIACMNLNGDYISDALAAQVGGIGIAPGANIGDECALFEATHGTAPKYAGQDKVNPGSIILSAEMMLRHMGWTEAADLIVKGMEGAINAKTVTYDFERLMEGAKLLKCSEFGDAIIK

SEQ ID NO: 12287 - protein, 404 aa, Aspergillus nidulans FGSC A4
MASQVQPGQKPKVQPCRYKTGKTLGAGSYSVVKECVHIDTGQYYAAKVINKRLMVGREHMVRNEIAILKQVSTGHQNILTLVDYFETMNNLYLVTDLALGGELFDRICRKGSYYESDAADLVRAILSAVAYLHDHGIVHRDLKPENLLFRTPEDNADLLIADFGLSRIMDEEQLHVLTTTCGTPGYMAPEIFDKSGHGKPVDIWAIGVITYFMLCGYTPFDRETNLEEVQAIATANFSFTPVEYWRGVSQEARDFIKRCLTVNPKKRMTAHQALQHPWINPPYDTTDDLGSGEDLLPNIKKNFNARRTLHKAIDTVRAINKLRENGGLMMDGIMSVDPKPEHVNGSEVVEDRTTPRERENEDAMEIDSRSNARGQTEQQIREQERKVKETVAGLWSRTAPRSER

SEQ ID NO: 12288 - protein, 200 aa, Candida albicans SC5314
MATNITWHANLTHQERAELRKQKGVTVWLTGLSASGKSTIACALEQSILARGLNSYRLDGDNIRFGLNKDLGFSEADRNENIRRISEVAKLFSDSCCITVTSFISPYRADRRLARELHEKDNLPFVEVYIDVPLEVAEQRDPKGLYKKAREGIIKEFTGISAPYEAPEKAEIHVKNHSGLSVEQAAEQIIDYLLEKGYIN

SEQ ID NO: 12289 - protein, 231 aa, Triticum aestivum
  misc_feature (50)..(50): Xaa can be any naturally occurring amino acid
MCGILAVLGCGDESQGKRVHVLELSRRLKHRGPDWSGLHQVADNYLCHQXRLAIIDPASGDQPLYNEDKSIAVAVNGEVYNHEELRARLSGHRFRTGSDCEVIAHLYEEYGESFIDMLDGVFSFVLLDARDNSFIAARDAIGVTPLYIGWGIDGSVWISSEMKGLNDDCEHFEIFPPGNLYSSKEKSFKRWYNPPWFSEVIPSVPYDPLRLRSAFEKAVIKRLMTDVPFGV

SEQ ID NO: 12290 - protein, 1230 aa, Cryptococcus neoformans var. grubii
MNGFMPALRLHHTHSSSVSPTASNDAASSSPTSSQPHQLAAYSPLYATSPNRGSKITKGSSLSSSTAHHGLKYVRPSTSPLLKPPKGKSFSEYLGDWGSQELFTFLDIHKCGQYLAIFQENDINGKILLDLDVTALKSMGIDKISERVRLIGGIKDLRKRIADETIRAPFIQRCYPPERTLLPSLPSHSNVFLDKWDYSSSASRLGKGQIAFRPPPLDLQGHMPRKLLPHASQGIATIDTHDIRTTKPKIEAYIQQNPLGQPQSVPTKRSDSLTLCAPPSRNVRRRSPSSRHFEGRESQTDGFTILNMASDRQVPSSTMNSVTLGEDCHLQREEGLPLFLKVPQFRNTFASSHKTLIAGRGPLTRGDTISHQPSGPAIAGQDSPVNYRISKTVTTTKEASQGDLEHPFAVKSIGSQLGLLVGVSGMAHDPVTDGSKSKGKTSVPLTGTSSSDISAVNANSAALSLADLRRQLVKFINTEDDTIRTVNVMHVTSGEEILERALKKFGKWGTGMHSSPDVYGDEDGDETLEIDGWEVYTERTPDESSKPLSESSLLKTCTFHREGTAIQDKGLFLRKKQRLQKRKNIQHFFGETLPPPMSPTSPTLITGPHLGIVQGKSQLASEPAFSSSNRLSTLTNKGPNRASMISVMSGLGVPVINTLPSPQGNGLCPTGSVHSHKKKSMYNFFGHRPPSELISNHLADYFPSAKKSDVEKARHSLLRLSGDTVAYKKNGIDEGDNAPDHWSKPGNNQPPSLPPFEPSQDTLSDSLQAYASSTPVYLSRPKHNVALRRRRDSDSSSRSHTSVLMQTRRNRDRSDTASLLTVDEITAEVENRRASTIPKGDYIEETEDSSFIEGDTLPEYEESKGLLRTVCSDSNSIVDSGKSFQRDSDVDQQQELEDEEEDELDDEEEEEEEEKEDEDEQGKAFTSTGSKRIIKWIKGALIGAGSFGSVYLGMDAQSGLLMAVKQVELSAGSVKSEDRKKSMLSALEHEIELLKELQHENIVQYLDSSVDTNHLNIFLEYVPGGSVAALLNNYGAFEEGLVRNFVRQILTGLNYLHMRGIVHRDIKGANILVDNKGGIKISDFGISKKVENSLISGLRTNRPSLQGSVFWMAPEVVKQTSYSPKADIWSVGCLVVEMLTGTHPWADLTQMQAIFRIGSLARPAPPSDISVQADEFLRKTFEIEHAKRPTAAQLLKDPFIDSPRVRTTASNFISEAIVSEKMEVQVVEEM

SEQ ID NO: 12291 - protein, 404 aa, Escherichia coli
GKKITLQNGKLNVPENPIIPYIEGDGIGVDVTPAMLKVVDAAVEKAYKGERKISWMEIYTGEKSTQVYGQDVWLPAETLDLIREYRVAIKGPLTTPVGGGIRSLNVALRQELDLYICLRPVRYYQGTPSPVKHPELTDMVIFRENSEDIYAGIEWKADSADAEKVIKFLREEMGVKKIRFPEHCGIGIKPCSEEGTKRLVRAAIEYAIANDRDSVTLVHKGNIMKFTEGAFKDWGYQLAREEFGGELIDGGPWLKVKNPNTGKEIVIKDVIADAFLQQILLRPAEYDVIACMNLNGDYISDALAAQVGGIGIAPGANIGDECALFEATHGTAPKYAGQDKVNPGSIILSAEMMLRHMGWTEAADLIVKGMEGAINAKTVTYDFERLMEGAKLLKCSEFGDAIIK

SEQ ID NO: 12292 - protein, 327 aa, Triticum aestivum
MKTLLILTILAMAITIGTANIQVDPSGQVQWLQQQLVPQLQQPLSQQPQQTFPQPQQTFPHQPQQQVPQPQQPQQPFLQPQQPFPQQPQQPFPQTQQPQQPFPQQPQQPFPQTQQPQQPFPQQPQQPFPQTQQPQQPFPQLQQPQQPFPQPQQQLPQPQQPQQSFPQQQRPFIQPSLQQQLNPCKNILLQQSKPASLVSSLWSIIWPQSDCQVMRQQCCQQLAQIPQQLQCAAIHSVVHSIIMQQQQQQQQQQGIDIFLPLSQHEQVGQGSLVQGQGIIQPQQPAQLEAIRSLVLQTLPSMCNVYVPPECSIMRAPFASIVAGIGGQ

SEQ ID NO: 12293 - protein, 486 aa, Cycloclasticus oligotrophus
MQHINHFINGEFVSAVDGKSFEKRSPVDRRLIAQVSEGGKVDVDRAVHAARAALNGEWGAFTMEQRVEILYGVADEITRRFDDFVEAEMADTGQPKSIMTHAFIPRGAANFKIFADVIKNVPNESFQTTTPDGLGALNYAIRVPKGVVGVVSPWNAPFLLMTWKVGPALACGNTVVVKPSEETPLTTTLLGEVMNKVGVPKGVFNVVHGFGPDSAGEYLTHHPKVDAITFTGETTTGAAIMKAASEGMRDVSFELGGKNAGIVFADSDFDKAVDGIYKSSFLNSGQVCLGTERVYVERPIFDKFVEALKKKVEKVRHGRPDDENCNFGPMISHEHQAKVLSYYAKAVEEGATVVTGGGVPSIPEELKEGAWVEPTIWTGLAEDATVMKEEIFGPCCHIAPFDDEQQVINWANDTEYGLSTTVWTRDLSRAHRVAAKINVGITWINSWFLRDLRTAFGGSKQSGIGREGGVHSLEFYTETRNVCVKL

SEQ ID NO: 12294 - protein, 190 aa, Arabidopsis thaliana
MAFAGTTQKCMACDKTVYLVDKLTADNRVYHKACFRCHHCKGTLKLSNYNSFEGVLYCRPHFDQNFKRTGSLEKSFEGTPKIGKPDRPLEGERPAGTKVSNMFGGTREKCVGCDKTVYPIEKVSVNGTLYHKSCFKCTHGGCTISPSNYIAHEGKLYCKHHHIQLIKEKGNLSQLEGGGENAAKDKVVAA

SEQ ID NO: 12295 - protein, 446 aa, Mycobacterium tuberculosis H37Rv
MRALPAGRHFFRGSDGYEAARRGTVWHRRVPDRYPEVIVQAVSADDIVSAIRYATVNGHKVSVVSGGHSFAASHLRDGAVLLDVSRIDHASIDADKGRAVVGPGKGGSVLMAELEAQGLFFPGGHCRGVCLGGYLLQGGYGWNSRIYGPACESVIGLDVITADGAQIHCDADNHADLYWAARGAGPGFFGVVTSFYLKLYPRPATCGTSVYVYPFDLADEVFTWARAVSAEVDPRVELQALASRGEPSMGIDVPVISLASPAFADSPEEAEQALALFGTCPVVEQALVKVPYMPTDLPAWYDVAMTHYLSDHHYAVDNMWTSASAEDLLPGIRSILDTLPPHPAHFLWLNWGPCPPRQDMAYSIEADIYLALYGSWKDPADEAKYADWARSHMAAMSHLAVGIQLADENLGARPARFASDAAMAKLDRVRAEYDPDGLFNSWMGRI

SEQ ID NO: 12296 - protein, 496 aa, Burkholderia cepacia R18194
MTPFDTSLVPDGNILIGGEWRRGRGTPFASIYPADQSVNMEVSTANAEDAAEAVVAADAAWRRADWAGLKPHQRAQVLYRIADLIMQRHEALANLQRRDNGKPIGETRVLVASAANTFRYFAACLETLDEELTPSRGDYLTMSVYEPIGVIAAITPWNSPIASDAQKLAPALAGGNAVVLKPAEVTPLVSLALARICEEAGVPKGVLSVLPGKGSVIGDVLVRHPLVKKVSFTGGTEVGRGIARIAAEKLMPVSLELGGKSPTIVCDDADLDHAVNGVLYGIFSSSGEACIAGSRLFVQRAVYDEFMTRLVAGARKLRVGDPTRPDTQMGPLITAKHRESVERYVALGLEEGGRLLCGGERPSGDGRENGFFYQPTILEGLPNSARICQEEIFGPVLVAMPFDDEASLIAQANDSVFGLAAGIWTRDYKRAWRIARALETGTVWINTYKLFSISTPFSGWKESGMGREKGRLGIREYMQQKSLYWGLNDAPLPWAN

SEQ ID NO: 12297 - protein, 395 aa, Campylobacter jejuni
MKMDYKEQSHIVPAYKRFDIVLEKGQGVYLFDDKAKKYLDFSSGIGVCALGYNHAKFNAKIKAQVDKLLHTSNLYYNENIAAAAKNLAKASALERVFFTNSGTESIEGAMKTARKYAFNKGIKGGQFIAFKHSFHGRTLGALSLTANEKYQKPFKPLISGVKFAKYNDISSVEKLVNEKTCAIILESVQGEGGINPANKDFYKALRKLCDEKDILLIADEIQCGMGRSGKFFAYEHAQILPDIMTSAKALGCGLSVGAFVINQKVASNSLEAGDHGSTYGGNPLVCAGVNAVFEIFKEEKILENVNKLTPYLEQSLDELINEFDFCKKRKGLGFMQGLSLDKNVKVAKVIQKCQENALLLISCGENDLRFLPPLILQKEHIDEMSEKLRKALKSF

SEQ ID NO: 12298 - protein, 375 aa, Zea mays
MAAASWSAPTTSFAPAPAPPWGPWRTKAAPLPIRTLPRRVLLNAVGESAMVAAGDTLLGLYEKERLGLLQYADDESKEERYWETLDADLRYWTRSLRPVQWYPGHIAKTEKELKEQLRLMDVVIEIRDARIPLSTSHPKMDSWLGNRKRIIVLNRKDMISTEDMNAWATYFGNQGIKVVFSNGQLGMGTMKLGRMAKSVASVANTKRKEKGLLPRPVRAGIVGYPNVGKSSLINRLLKRRMCPAAPRPGVTRELKWVRFGTDLELLDSPGILPMRISDQTSAIKLAICDDIGERSYDFADVAAILVQMLIRHPAVGSEAFRRRYKIDVDSECGKTFVTKLSVHLFNGDTSQAAFRILSDYRKGKFGWVALERPPT

SEQ ID NO: 12299 - protein, 449 aa, Arabidopsis thaliana
MDKISGFSDDELLVKILSFLPFKFAITTSVLSKQWKFLWMRVPKLEYDEDSMYSFEYSFRYFLPKAKEVDSETYSIVSESGHRMRSFIEKNLPLHSSPVIESLRLKFFTEVFQPEDIKLWVEIAVSRCAQELSVDFFPKEKHNALLPRNLYTCKSLVTLKLRNNILVDVPHVFSLPSLKILHLERVTYGDGESLQRLLSNCSVLEDLVVELDTGDNVRKLDVIIPSLLSLSFGMSRYCAYEGYRIDTPSLKYFKLTDLSKTFSGLIENMPKLEEANITARHNFKKLLELVTSVKRLSLNIENNDAEALTAIYGDDIVFNELEHLNFHIHNAYWSELLYWLLKASPKLQNLEFDEQCSRDGTMGTLAVFWNQPNSVPQCLLSTLQTFEWSGYPGSVQGKDLATYILRKSRQLKIATISIGYGLDPQQKLKMEMDVKFSFRASPTCKRVFY

SEQ ID NO: 12300 - protein, 274 aa, Brassica napus
  misc_feature (230)..(230): Xaa can be any naturally occurring amino acid
  misc_feature (264)..(264): Xaa can be any naturally occurring amino acid
MDIFDNSDLEYLVDDFHGFSDSEDDEPFGEFDHKSEADSDFEDDLDPTQESDTSALEARNGKDIQGIPWERLNYSRDQYRYKRLQQYKNFEILFRSRQDLDKECLQVEKGKHFYDFQFNTRLVKSTIAHFQLRNLLWATTKHDVYFMKNYSLMHWSSLLQRSKEVLNVAKPIVPTMKQPGLLSQSISRVQISTMAVKDDLIVAGGFQGELICKRINEPGVAFCTVLHRFXNDITNSVDIYNAPSGSLRVITANNDCTVRVLDAXNFAFLNSFTL

SEQ ID NO: 12301 - protein, 403 aa, Sisymbrium altissimum
YQGVYPVKCNQDRFIIEDIVRFGSSFGFGLEAGSKPEILLAMSCFCKGNPEAFLVCNGFKDSEYVSFALLGRKLELNTVIVLEQEEELDLVIDLSQKMNVRPVIGLRAKLRTKHSGHFGSTSGEKGKFGLTTIQILRVVRNLRQLGMLDCLQLLHFHIGSQIPSTALLSDGVAEAAQLYCELVRLGAHMKVIDIGGGLGIDYDGSKSGESDLSVAYTLEEYAEAVVASVRFVCDQKSVKHPVICSESGRAIVSHHSVLIFEAVSAVKQHANPDDIQFLLEGEEVRAEYEDLYAAVMRGDRESCFLYVDQLKQRCVEGFKDGSLSIEQLVSVDGLCESVLKAIGASDPVQTYNINLSVFTSIPDFWGIDQLFPIVPIHKHDQRPGARGILSDFTCDSDGKIDKF

SEQ ID NO: 12302 - protein, 294 aa, Staphylococcus aureus subsp. aureus COL
MVIQWYPGHMAKAKREVSEQLKKVDVVFELVDARIPYSSRNPMIDEVINQKPRVVILNKKDMSNLNEMSKWEQFFIDKGYYPVSVDAKHGKNLKKVEAAAIKATAEKFEREKAKGLKPRAIRAMIVGIPNVGKSTLINKLAKRSIAQTGNKPGVTKQQQWIKVGNALQLLDTPGILWPKFEDEEVGKKLSLTGAIKDSIVHLDEVAIYGLNFLIQNDLARLKSHYNIEVPEDAEIIAWFDAIGKKRGLIRRGNEIDYEAVIELIIYDIRNAKIGNYCFDIFKDMTEELANDANN

SEQ ID NO: 12303 - protein, 258 aa, Arabidopsis thaliana
MFLQVHEIAFLFGLLGNIVSFGVFLSPVPTFYGIYKKKSSKGFQSIPYICALASATLLLYYGIMKTHAYLIISINTFGCFIEISYLFLYILYAPREAKISTLKLIVICNIGGLGLLILLVNLLVPKQHRVSTVGWVCAAYSLAVFASPLSVMRKVIKTKSVEYMPFLLSLSLTLNAVMWFFYGLLIKDKFIAMPNILGFLFGVAQMILYMMYQGSTKTDLPTENQLANKTDVNEVPIVAVELPDVGSDNVEGSVRPMK

SEQ ID NO: 12304 - protein, 205 aa, Sulfolobus islandicus
YSIAKLASHKLWNLLNTEPYIATFGALTGSQAVEMAKAGLKAIYVSGWQVAADNNLSNQTYPDLSLYPSNSVPNLVKRLNNALLRADQISWSEGKHDIDYLLPIVADAEAGFGGPIHAFELTKALIEAGAAGVHFEDQLAAEKKCGHLGGKVLIPISAFIRVLNAARLASDVLGVPIILIARTDALNAKYLSNDVDETDNQFLTG

SEQ ID NO: 12305 - protein, 297 aa, Zea mays
  misc_feature (78)..(78): Xaa can be any naturally occurring amino acid
  misc_feature (124)..(126): Xaa can be any naturally occurring amino acid
MAIATESRGSEDRASAHANEEKRWVLSDFEVGKPLGRGKFGHVYLAREKRSNQIVALKVLFKSQLKQSQVEHQLRREXVEIQSHLRHPNILRLYGYFYDQTRVYLILEYAAKGELYKELTRCKXXXERRTATYVASLARALIYLHGKHVIHRDIKPENLLVGVQGEIKIADFGWSVHTFNRRRTMCGTLDYLPPEMVEKAEHDYHVDIWSLGVLCYEFLYGVPPFEAKEHSETYRRIVKVDLKFPLKPFVSPAAKDLISQMLVKSSAQRLPLHKVLEHPWIVQNADPSGVYREGRSI

SEQ ID NO: 12306 - protein, 72 aa, Glycine max
MPLVLAKSDSIQIREVWNDNLEEEFALIREIVDDYPYIAMDTEFPGIVLRPVGNFKNSYDYHYQTPKDNVDM

SEQ ID NO: 12307 - protein, 403 aa, Stanleya pinnata
YQGVYPVKCNQDRFIIEDIVRFGSSFGFGLEAGSKPEILLAMSCFCKGNPEAFLVCNGFKDSEYVSFALLGRKLELNTVIVLEQEEELDLVIDLSQKMNVRPVIGLRAKLRTKHSGHFGSTSGEKGKFGLTTIQILRVVRNLRQLGMLDCLQLLHFHIGSQIPSTALLSDGVAEAAQLYCELVRLGAHMKVIDIGGGLGIDYDGSKSGESDLSVAYTLEEYAEAVVASVRFVCDQKSVKHPVICSESGRAIVSHHSVLIFEAVSAVKQHANPDDIQFLLEGEEVRAEYEDLYAAVMRGDRESCFLYVDQLKQRCVEGFKDGSLSIEQLVSVDGLCESVLKAIGASDPVQTYNINLSVFTSIPDFWGIDQLFPIVPIHKQDQRPGARGILSDFTCDSDGKIDKF

SEQ ID NO: 12308 - protein, 139 aa, Triticum aestivum
  misc_feature (30)..(30): Xaa can be any naturally occurring amino acid
  misc_feature (55)..(55): Xaa can be any naturally occurring amino acid
  misc_feature (65)..(65): Xaa can be any naturally occurring amino acid
  misc_feature (67)..(67): Xaa can be any naturally occurring amino acid
  misc_feature (76)..(76): Xaa can be any naturally occurring amino acid
  misc_feature (87)..(87): Xaa can be any naturally occurring amino acid
  misc_feature (94)..(94): Xaa can be any naturally occurring amino acid
  misc_feature (96)..(96): Xaa can be any naturally occurring amino acid
  misc_feature (119)..(119): Xaa can be any naturally occurring amino acid
MSDSEEHHFESKADAGASKTYPQQAGTVRXKNGFHPSIKEPPCKFVEVLPPKTGXKHGPCQIHFXFXINIFQTGKXPEICPFVTQLXIFPHVNXTXYQLDLIYPKDGFVPSLLQNGNTXIFLTPNWSLWPLRRFLNCLL

SEQ ID NO: 12309 - protein, 118 aa, Oryza sativa (japonica cultivar-group)
MARAQLVLVALVAAALLLAGPHTTMAAISCGQVNSAVSPCLSYARGLRPSAACCSGVRSLNSAASTTADRRTACNCLKNVAGSISGLNAGNAASIPSKCGVSIPYTISPSIDCSRELI

SEQ ID NO: 12310 - protein, 173 aa, Prunus armeniaca
MEHEETGCQPHPEGPILCVNNCGFFGSVATRNMCSKCHKDMMLKEEQAKLAASSFGNIVNGTSNSNGNEPVVAAGVDVQAHLVEPKTISLQPSFSFGSGSGGSGEAKPEGPKRCGTCNKRVGLTGFNCRCGHLFCAVHRYSDKHDCPYDYHTAARDVIAKANPVVKADKLEKI

SEQ ID NO: 12311 - protein, 367 aa, Prunus persica
MGKGGMSSQGGALEAHVEQENMAAWLVGVNTLRIQPFKLPTVGPNDVRVKIKAVGICGSDVHYLKTMKCADFVVQEPMVIGHECAGIVDEVGSLVKNLVPGDRVALEPGISCWRCEQCKGGRYNLCPDMKFFATPPVHGSLANQIVHPADLCFKLPENVSLEEGAMCEPLSVGVHACRRANIGPETNVLVIGAGPIGLVSVLSARAFGAARIVIVDVDDERLSIAKSLGADDAVKVSTNPQDLEDEVSKISKAMKGGVDVSFDCVGFNKTMSTALSATRPGGKVCLVGMGHGVMTVPLTPAAAREVDVVGIFRYKNTWPLCLEFLRTGKIDVKPLITHRFGFSQKEIEEAFETSARGGNAIKVMFNL

SEQ ID NO: 12312 - protein, 206 aa, Schizophyllum commune
MALCGSSKGRGRGRPIQRKVVVCGDGACGKTSLLNVFTRGFFTQVYEPTVFENYVHDLYIDDQLVELSLWDTAGQEEFDRLRSLSYAETHVIMICFSVDNPTSLENVESKWLDEILEYCPGVKLVLVDSKCDLRDDPAVLDRLQRYGTHTDQYEEGLGVARRIRASRYLECSSKHNRGVNEVFLRGRARVTVHSIRQGSAGSCCVM

SEQ ID NO: 12313 - protein, 342 aa, Methanosarcina acetivorans C2A
MTKTAAVIKGDGVGPELVEAMLKVANAAGTDVEFVMCEAGAGWWEEHGGNSLVPDETWQILDSSDACFKGPTTTPGGIGSPRSVAVSIRRKYDLYANVRPIKTFPNSNAPLGDVEMVCVREGTEGLYIGEEIQLTDDVSIAIRKITRTASGKIARYAFEEAKRRGYDTVVPIHKSNILKLTCGSFLEEVEKVAQDYPNIEVWPYHIDNIAQQLIKNPQIFNKKVLLSTNLFMDVISEECSALVGSIGLIYSANLGDNFAMFEPAHGSAPKYAGLDKVNPVATVLAGAWMLDYLGEKEKSEAIFKATERVISEGKYVTYDVGGNAKLSQMADEIAKYTAEILK

SEQ ID NO: 12314 - protein, 367 aa, Glycyrrhiza echinata
MSDSYSTKDNNLFSTSSEQTEDGACLSAMRLVTNLVYPAVLNAAIDLNLFEIIAKATPPGAFMSASEIASKLPLPTQHSDLPNRLDRMLRLLASYSVLTCATRSTERVYGLSQVGKYLVPDGSRGYLASFTTFLCYPALMNVWLNFKEAVVDEDIDLFKKLHGVSKYEYMETDPKMNHIFNKSMADVCATEMKRILQIYKGFEGISTLVDVGGGNGQNLKMIISKYPLIKGINFDLPQVIENAPPIPGIELVGGDMFASVPQGDAMILKAVCHNWSDEKCLEFLSNCHKALSPNGKVIVVEFILPEEPEPTEESQLASTLDNIMFITVGGRERTQKQYENMCKLAGFSKFQVACRAFSSLGVMEFYK

SEQ ID NO: 12315 - protein, 290 aa, Glycine max
SWSISVFEQVKWIRVLYADFTAFIRDQEKLIFAEKAFDYVEGFVIINRTGLLNNWSSSFNPQDPVQASEFKSDGRTLFCLELAKYYNLEETLLVNQEVEKHLSRLNYIPSTLFLTEVTYVDFLDRVHTSEVKLRSKGLWDVPHPWLNLFIPKTKIHHFAEVVFGNIVTETSNGPVLIYPVNKSKWDNRTSVVIPEEDIFYLVAFLTSAVPSSNGTDGLEHILSQNKRILEFCERAQLGVKQYLPHYNTQQEWRAHFGPQWETFLLRKSVYDPLAILAPGQRIFQKAITFS

SEQ ID NO: 12316 - protein, 497 aa, Pseudomonas syringae pv. tomato str. DC3000
MTTLTRADWEQRAQNLKIEGRAFIQGEYTAAASGETFDCISPVDGRLLAKVASCDAADAQRAVESARSAFDSGAWSRLAPAKRKATMIRFAGLLEQNAEELALLETLDMGKPISDSLGVDIPGGARALSWSGEAIDKLYDEVAATPHDQLGLVTREPVGVVAAIVPWNFPLMMACWKLGPALSTGNSVVLKPSEKSPLTAIRIAQLAIEAGIPAGVLNVLPGYGHTVGKALALHMDVDTVVFTGSTKIAKQLMIYAGESNMKRVWLEAGGKSPNIVFADAPDLQAAADSAASAIAFNQGEVCTAGSRLLVERSIKDRFLPMVIEALGTWKPGNPLDPATNVGALVDTQQMNTVLSYIAAGHTDGARLVAGGKQILQETGGTYVEPTIFDGVNNAMRIAQEEIFGPVLSVLTFDTAEEAIQIANDTPYGLAAAVWTANLSKAHLTARALRAGSVWVNQYDGGDMTAPFGGFKQSGNGRDKSLHAFDKYTELKSTWIKL

SEQ ID NO: 12317 - protein, 205 aa, Triticum aestivum
  misc_feature (28)..(28): Xaa can be any naturally occurring amino acid
  misc_feature (100)..(100): Xaa can be any naturally occurring amino acid
PGIYLHSTPLAPPVMACSATSVGPFQGXLKSTAGLPVTRRSNGASLASVSHGGRIRCMQVWPIEGIKKFETLSYLPPLSTEALLKQIDYLIRSKCVPCLXEFSKVGFIFREHNASPGYYDGRYWTMWKLPMFGCTDATQVINEVEEVKKEYPDAYVRIIGFDNMRQVQCTSFIAFKPPPPEEKAPPSPAHSRQAIYKVPLQFCQL

SEQ ID NO: 12318 - protein, 180 aa, Glycine max
  misc_feature (137)..(137): Xaa can be any naturally occurring amino acid
MSGRVSGKVKWFNDQKGFGFITPDDGSEELFVHQSQIKSDGFRSLAEGESVEFAIESESDGRAKAVDVTGPDGASVQGTRRGGDGGRSYGGGRGGGYGGGGRGGGGGACYNCGESGHLARDCSQGGGGDRYGGGTEXNGRFGGDGKKRYGGGGGGGGGGGSCYSCGESGHFARDCPSSAR

SEQ ID NO: 12319 - protein, 208 aa, Glycine max
SGRDVACPQLGTRLEIISEHTLLLIFIILPLSIPNSLSEIRMASQSNTKSVHDFTVKDARGNDVNLADYKGKVLLLVNVASQCGLTNSNYTELNQLYEKYKGKGLEILAFPCNQFGAQEPGTNEEIVEFACTRFKAEFPIFDKVDVNGDNAAPLYKFLKSSKGGLFGDSIKWNFSKFLVDKDGNVVDRYAPTTSPLSIEKDIKKLLDA

SEQ ID NO: 12320 - protein, 243 aa, Zea mays
MFGYRKADPDLEAGGSSLLYPGMTESPELRWAFVRKIYVILTVQLAMTAAVSAFVVKVPAVSNFFVSSNAGIALYIFLIVLPFIVLCPLHYYHQKHPINLLLLGLFTVAISFAVGMTCAFTSGKIILEAAILTAVVVNSLTAYTFWAAKRGHDFNFLGPFLIAAIMVLMVFSLIQIFFPLGKISVMIYGGLASLIFCGYIIYDTDNIIKRHTYDQYIWAAVSLYLDVINLFLSLLQLLRAADS

SEQ ID NO: 12321 - protein, 277 aa, Glycine max
MPLVLAKSDSIQIREVWNDNLEEEFALIREIVDDYPYIAMDTEFPGIVLRPVGNFKNSYDYHYQTLKDNVDMLKLIQLGLTFSDEHGNLPTCGDESGTCCIWQFNFREFNVNEDVFANDSIELLRQSGIDFKRNNENGIDAHRFGELLMSSGIVLNDNVHWVTFHSGYDFGYLLKLLTCQDLPDTQVGFFNLINMYFPTVYDIKHLMKFCNSLHGGLNKLAELLEVERVGICHQAGSDSLLTSCTFRKLKDNFFSGSLEKYAGVLYGLGVENGQGSH

SEQ ID NO: 12322 - protein, 230 aa, Mycobacterium avium subsp. paratuberculosis str. k10
MSNNITWHEHKISRGEREQLNGHKGCVIWFTGLSGSGKSTVANVVEQKLYERGIRSYLLDGDNVRYGLNAGPDLLEERHGPEFAQRFGLGFSAQDREENIRRIGAVAKLFCEAGIIALTAFISPYVRDRDAIRATLDDGDFQEIFIDTPIEICEKRDPKGLYKKARAGEIKGFTGIDDPYEAPPRPELRLDGAAKDAETLAEEVIAHLERVGVIATDGLAHTRGRDEVTA

SEQ ID NO: 12323 - protein, 475 aa, Bordetella parapertussis 12822
MYEQLALYIDGEFLTGDGRRTQDVVNPATLEVLGQLPHASEADLDRALAAAQRAFETWKRTSPMERAAILRKVGQLSRDRAQEIGRNMTLDQGKPLAEAVGEVASCSEHADWHAEECRRIYGRVIPPRNPDVRQFVVREPIGVCAAFTPWNFPYNQAIRKIAAALGAGCTVVLKGPEDSPSAVMAIARMFHEAGLPKGCLNIVWGEPAKISDYLIRSPIVRKVSFTGSVPVGKQLAALAGAHMKRVTMELGGHSPVLVFDDADVDRAAEMLERFKVRNAGQVCVSPTRFYVQNGAYEQFLARFTEVLKNIKVGDGLEKGTDMGPLAHERRVPAMSTFVDDALKHGGKVVLGGDAPDRKGYFFSPTVVTELPDNAMLMTEEPFGPLAPVVRFTDTDEVLRRANSLPFGLSSYVFTNSLKTATKVSNALEAGMVNINHFGSALAETPFGGIKDSGIGSEGGLETFDGYLVTKYITHI

SEQ ID NO: 12324 - protein, 250 aa, Capsicum annuum
MGKCYPTVSEEYLKAVDKCKRKLRGLIAEKNCAPLMLRLAWHSAGTYDVCSKTGGPFGTMRFKTEQSHGANNGIDIALRLLEPIREQFPILSYADFYQLAGVVAVEVTGGPDVPFHPGREDKPEPPVEGRLPDATKGSDHLRDVFVKQMGLSDQDIVALSGGHTLGRCHKERSGFEGPWTANPLIFDNSYFKELLGGEKEGLLQLPSDKALLSDPAFRPLVEKYAADEDAFFADYAEAHLKLSELGFAEA

SEQ ID NO: 12325 - protein, 407 aa, Sporothrix schenckii
MSFSSMLSRLHGQPDSYDKKSKYHFGRMLGAGTYGIVREADGPTGKVAIKVILKKNVKGNEQMVYDELNLLQNLKHSHIVRFVDWFESRDKYYIVTELATGGELFDRICEQGKFTEKDASQTIKQVLSAVDYLHKNNVVHRDLKPENLLYLTKQSDSDLVLADFGIAKMLDSKDEVLTTMAGSFGYAAPEVMLKKGHGKPVDMWSMGVITYTLLCGYSPFRSENLPDLIEECTSARVIFHERYWKDVSEDAKDFIIGLLQPNPDDRWSSGDALKHKWLSGESATEHNLLPEIKAYMAKARLRRGIELVKLTNRIEALKMQEDDPENSDMQTDTAAPLQKAAAAAAAQDDGASGSVGAESGPTDKTKQTIQKVKGAIFREVVMAKVREMRQQEEVRKEVEEASKQGSP

SEQ ID NO: 12326 - protein, 127 aa, uncultured marine gamma proteobacterium EBAC20E09
MATSKDDILKAIEEMSVMDLVDLISAIEEKFGVTAAAAVAAAPAAAGGDGDAPAAEEKDEFDVVLSAAGDQKVQVIKAVRAITGLGLKEAKDMVDGAPSTLKEGVKKEEAEGMLAQLTEAGATGELK

SEQ ID NO: 12327 - protein, 388 aa, Salmonella enterica subsp. salamae
QNGKLNVPENPIIPFIEGDGIGVDVTPAMLKVVDAAVEKAYKGERKISWMEIYTGEKSTQVYGQDVWLPAETLDLIRDYRVAIKGPLTTPVGGGIRSLNVALRQELDLYVCLRPVRYYQGTPSPVKHPELTDMVIFRENSEDIYAGIEWKADSADAEKVIKFLREEMGVKKIRFPEHCGIGIKPCSEEGTKRLVRAAIEYAITNARDSVTLVHKGNIMKFTEGAFKDWGYQLARDEFGGELIDGGPWLKIKNPNTGKEIVVKDVIADAFLQQILLRPAEYDVIACMNLNGDYISDALAAQVGGIGIAPGANIGDECALFEATHGTAPKYAGQDKVNPGSIILSAEMMLRHMQWFEAADLIVKGMEGAIAAKTVTYDFERLMEGAKLLK

SEQ ID NO: 12328 - protein, 127 aa, Brassica napus
MAGMVFGLEAPMMTALQHLLDIPDGEAGAPAGEKQGPTRAYVRDARAMAATPADVKELPGAYAFVVDMPGLGSGDIQVQVEDERVLVISGERRREEKEDAKYLPMERRMGKLMRKFVLPGNADMEKI

SEQ ID NO: 12329 - protein, 292 aa, Zea mays
  misc_feature (124)..(124): Xaa can be any naturally occurring amino acid
  misc_feature (168)..(168): Xaa can be any naturally occurring amino acid
EDYYNPNFAVEDARGPREPWDDLHSKIDGPEAYDVLKNFEERWLKASKRSAAKKLSKLSRSHNDSLLWINKIPDIIAIDDEIYSNDDDPERWDVQIFRSIDSNSVKGFPKDPREATSKNLVCGXNVLIDMSVHTTYVNAIRGAQHFIYIENQYFLGSSFNWDSHRDVXKMTMQIMYEIIYKAMKEVGLDGTYEPQDYLNFFCLGNREAEDTTCTSSGPFSTTWISNQDQARNNRRFMVYVHSKGMIVDDEYVIIGSANINQRSMEGTRDTEIAMAAYQPQHTLANMLSAPRG

SEQ ID NO: 12330 - protein, 104 aa, Triticum aestivum
  misc_feature (19)..(19): Xaa can be any naturally occurring amino acid
  misc_feature (32)..(32): Xaa can be any naturally occurring amino acid
NTPTTKEAYYYRPVAEKFXFPRNAVRLTVPGXGPSVACSTAKAVEWDTAWSKLLDPSGRAGLGVHHSAYKQKAPGSVDPAVDDVSCSPAHDVKRLKTAVSAAAV

SEQ ID NO: 12331 - protein, 450 aa, Desulfovibrio desulfuricans G20
MTATRFESGSIVLDTTIPNLGPAKIPSPLSYCRFANEEQGLSLFLDHDQVEELGDEVVPLTFEPAGPRRHVYFDTSKTKCAIVTCGGLCPGINDVIRAIVMEAYHNYRVPAVLGIKYGLEGFIPRYGHDVVELTPALVGDIHQFGGTILGSSRGPQSPEEIVDALERMNVNILFMIGGDGTMKAVRSITGEINQRRLKISVIGIPKTIDNDINFISQSFGFETAVDKATEAIQCAHTEAVGAMNGIGLVKLMGRESGFIAAQATLSLKEVNFVLVPETPFTLHGEDGLLNALAQRLRERSHAVIVVAEGAGQHLLSGSHDTDASGNPILGDIATLLRTEIKSHFDKLGIPHTLKYIDPSYIIRSVPANANDRVYCGFLGQNAVHAGMAGKTGMVVAKLMDRYIHLPLDLVTSKRRKLNIISDFWRAVLESTGQSHLAGMVPPEARSCPRA

SEQ ID NO: 12332 - protein, 437 aa, Neurospora crassa
MAPSAGCEHTPMHLPALSTASSINASVLHGPRDLRLERRTIEEPELGELQVAVKTTGICGSDVSYYKKFANGDLCACMPLSLGHESSGVVVAIGPQVSGFSLGDRVALEVGVACGQCTICRKGRYNLCKKMRFRSSAKSVPHYQGTLQERINHPAIWCHILPDHISFDAAALLEPLSVGIHAVNRASPAPGSTALVLGAGTVGLLTAAMARQAGCTQVTITDVDQGRVDHAIFKGFATHGYLVPRSHHISSSSSSMFPNSNSNSSSGSSTPSDGIATPPSTLSFRSSLDSAKALAADVLTQTQNPVLDRDDEDIGVDVTFECTGKEVCMHTALYATRPGGKVIMVGMGTPIQTLPLSVAHLREIDILGVFRYANTYATGIRMLCNQKGSGAGFTLPSLDDMVTHRFKGLENAKGAFELASRTMDNEGNLVLKVVIEA

SEQ ID NO: 12333 - protein, 216 aa, Halobacterium sp. NRC-1
MRGQPVHRRSVLALVGGGAVSALAGCTDTTDGDATTTTPEPTPRSETQPTPTATDDIPIAGPSPDFGGLGLASNAFADGAAIPDRYTRSGADVNPPLSIAGVPEDAATLVLVVDDPDAVDPAGEVWLHWLVWNIPASRTRIPAAWTPTEPTVGTNDFGERDYGGPAPPDDTHLYRFKLYALDTTLILPQDATERTVGNAVRGHVLASTQLVGSHAP

SEQ ID NO: 12334 - protein, 507 aa, Caulobacter crescentus CB15
MTQVFPTPAAHAREILAKLGAPPLPADAGEPVRGPIDGAILGHVVYDDARQIEAKVAAACRAFADWRVVPAPRRGELVRLFGEELRAAKADLAALVTLEAGKIASEAAGEVQEMIDICDFAVGLSRQLHGLTIASERPGHAMRETWHPLGPVAVISAFNFPVAVWAWNACLALVCGDPVIWKPSEKTPLTALATQAILERALARFRDAPQGLSSVVLGARDAGERLARDPRIPLVSATGSTRMGRAVAPMVAERFGRSILELGGNNAMIVTPSADLSLALRAIVFSAAGTAGQRCTSLRRLIVHESLVDKVSDAVEAAFQRLSVGDPRDPKTLLGPLIDKAAYDAFIAAMNQVRAEGGSVAGGERVLIDEHPDAYYVRPALARLPAPAPCMQRETFAPLLHVVPYNSFDMAIAIQNDVPQGLSSCVMTNDVREAERFLAAAGSDCGIANVNIGPSGAEIGGAFGGEKETGGGRESGSDSWKQYMRRQTATVNYSGALPLAQGVRFDL

SEQ ID NO: 12335 - protein, 194 aa, Glycine max
MGFRFKSNPQLRRGLCCANDDKQQERSPSVIVIGGGMAGIAAARALQDASFQVILLESRERLGGRIHTDYSFGFPVDLGASWLHGVCKENPLAPLIGKLGLPLYRTSEDNSVLYDHDLESYALFDMDGNQVPQELVTKIGKIFGVILEETNNVREEFSEDMSILRALSIVFERKPELRLEGLSHQVLQWYYAEW

SEQ ID NO: 12336 - protein, 131 aa, Oryza sativa (indica cultivar-group)
MDATTTDATTAKRKRPAASDIADDAPTTVDEVSDAEVEEFYAILRRMRDATRRLGARPPPPRAPAWRPSFSWEDFADAPPKQAPPPPQQPADHERVAENATPPRRPAPGLDLNVEPPSDAPATPRSARAPA

SEQ ID NO: 12337 - protein, 469 aa, Streptococcus pyogenes M1 GAS
MVSVMWFRRDLRIDDQKALAHAIASQSPTLCVFQFNKEQLNLLHSRNQSSFITSVLAFRKLLKCEGIDLYLMYGDLMTCFEQLLTQLKDWTDVYFNYDESGYGRLRDQKAAQFFKKNGIAVHTYQDHYLHGSQEIINQSGQPYKVFTPYYRIWQNYPKETPIKVELSQGRWLNLETPDDVLRTVESFKDEKYQDVATFDEASKQLNRFIQDQLAAYHANRDFPAQLGTSRLSPFLRIGAIGIRTVYHAVRQAPNSLGQATFLKELAWRDFYNMVYVAYPDQKTQPIQKAFSQIEWVNNPDWFQLWKEGKTGYPIVDAAMLQLQKTGWMHNRLRMIVASFLTKDLLCDWRLGEQYFQQQLIDYDAASNIGGWQWAASTGTDAVPYFRIFNPVTQGKRFDPKGEFIKAYLPQLEHVPEKYLHEPWKMPKNLQESVSCIIGTDYPQPIVDHAKQREQAIAKYEWAKEKAKIE

SEQ ID NO: 12338 - protein, 153 aa, Medicago sativa
TTRKITLKSSDGETFEVDEAVALESQTIKHMIEDDCADSGIPLPNVTSKILAKVIEYCKKHVDAAAAEDKPNEDELKSWDSEFVKVDQATLFDLILAANYLNIKSLLDLTCQTVADMIKGKTPEEIRKTFNIKNDFSPEEEEEVRRENQWAFE

SEQ ID NO: 12339 - protein, 205 aa, Sulfolobus islandicus
YSIAKLASHKLWNLLNTEPYIATFGALTGSQAVEMAKAGLKAIYVSGWQVAADNNLSNQTYPDLSLYPSNSVPNLVKRLNNALLRADQISWSEGKHDIDYLLPIVADAEAGFGGPIHAFELTKALIEAGAAGVHFEDQLAAEKKCGHLGGKVLIPISAFIRVLNAARLASDVLGVPTILIARTDALNAKYLSNDVDETDNQFLTG

SEQ ID NO: 12340 - protein, 403 aa, Thellungiella salsuginea
YQGVYPVKCNQDRFIIEDIVKFGSSFRFGLEAGSKPEILLAMSCLCKGNPEAFLVCNGFKDSEYISLALLGRKLELNTVIVLEQEEELDLVIDLSQKMNVRPVIGLRAKLRTKHSGHFGSTSGEKGKFGLTTIQILRVVRNLRQAGMLDCLQLLHFHIGSQIPSTALLSDGVAEAAQLYCELVRLGAHMKVIDIGGGLGIDYDGSKSGESDLSVAYTLEEYAEAVVASVRFVCDQKSVKHPVICSESGRAIVSHHSVLIFEAVSAVKQHANPDDIQFLLEGEEVRADYEDLYAAVMRGDRESCFLYVDQLKQRCVEGFKDGSLSIEQLASVDGLCESVLKAIGASDPVHTYNINLSVFTSIPDFWGIDQLFPIVPIHKLDQRPGARGILSDFTCDSDGKIDKF

SEQ ID NO: 12341 - protein, 329 aa, Pyrococcus furiosus DSM 3638
MLKKSEEIEGTKVEGPWLDDTKSLEEVVSLYTQIGFQATHLGKAIEIWRKIEEKREKGEEIRVFLGYTSNIVSSGLREIIAWLVKHRKVDVIVTTAGGVEEDFIKALKPFILGDWIVNDAELRKKGINRIGNIFVPNDRYIEFEKYMIPFFERILEIEREKGRPLTASEFIYELGRFMDEKLGKEKEKSIIYWAYRNEIPIFCPAITDGSIGDMLYFFKEERRDRELIIDIANDIVKLNNLAVTAKETASIILGGSLPKHAIINANLFRGGSDYAIYITTAVPWDGSLSGAPPSEGVSWGKIRAKADYVEIWADATLVFPILVWMVMKR

SEQ ID NO: 12342 - protein, 134 aa, Zea mays
FGSRLSQKPKPKGVTFIFIIQSFQRSSFFFFSSESRKHALAEVKLRFCPSSGGVGEEHVRRNNNIDIDMARCFGLGSVLVLAALAASMVVLPLMLPPLPPPPLVLLFFPVGIMAALMLLAFSPSDQNGVVYAST

SEQ ID NO: 12343 - protein, 570 aa, Glycine max
  misc_feature (227)..(227): Xaa can be any naturally occurring amino acid
MCGILAVLGCVDNSQTKRARIIELSRRLRHRGPDWSGIHCYEDCYLAHQRLAIVDPTSGDQPLYNEDKTVIVTVNGEIYNHKQLRQKLSSHQFRTGSDCEVIAHLYEEHGEEFVNMLDGMFAFILLDTRDKSFIAARDAIGITPLYLGWGHDGSTWFASEMKALSDDCERFISFPPGHIYSSKQGGLRRWYNPPWFSEDIPSTPYDPTLLRETFERAVVKRLMTDVXPFGVLLSGGLDSSLVAAVVNRYLAESESARQWGSQLHTFCIGLKGSPDLKAAKEVADYLGTRHHELYFTVQEGIDALEEVIYHIETYDVTTIRASTAMFLMSRKIKALGVKMVLSGEGSDEIFGGYLYFHKAPNKKEFHEETCRKIKALHLYDCLRANKSTAAWGVEARVPFLDKEFINVAMSIDPEWKMIRPDLGRIEKWVLRNAFDDDKNPYLPKHILYRQKEQFSDGVGYSWIDGLKDHANKQVTDATMMAANFIYPENTPTTKEGYLYRTIFEKFFPKNAAKATVPGGPSVACSTAKAVEWDAAWSKNLDPSGRAALGIHDAAYDAVDTKIDEPKNGTL

SEQ ID NO: 12344 - protein, 75 aa, Glycine max
MADSDLSSSQISTHSTDSGNRGSSKVEFSEDEETLIIRMYKLVGERWSIIAGRIPGRTAEEIEKYWTSRFSGSSE

SEQ ID NO: 12345 - protein, 405 aa, Nasturtium officinale
YQGVYPVKCNQDRFIIEDIVEFGSKFRFGLEAGSKPEILLAMSCLCKGNPEAFLVCNGFKDSEYISLALLGKKLELNTVIVLEQEEELDLVIDLSQKMNVRPVIGLRAKLRTKHSGHFGSTSGEKGKFGLTTIQILRVVRKLRQVGMLDCLQLLHFHIGSQIPSTALLSDGVAEAAQLYCELVRLGANMKVIEIGGGLGIDYDGSKSGESDLSVAYTLEEYAAAVVASVRFVCDQKSVKHPVICSESGRAIVSHHSVLIFEAVSAGQQHETPSDVQFMLEGYSEEVRADYENLYGAAMRGDRESCLLYVDQLKQRCVEGFKEGSLSIEQLAGVDGLCESVIKAIGASDPVLTYNINLSVFTSIPDFWGIDQLFPIVPIHKLDQRPVARGILSDLTCDSDGKMDKF

SEQ ID NO: 12346 - protein, 436 aa, Oryza sativa (japonica cultivar-group)
MGFVESIGRYRVGRTIGAGTFAKVRLAVDADTGATVAVKVIDKRMVIRNNLMYQVKREITAMKLLNHPNIVKIYEVIATKTKICLVMEYVSGGQLSDKLSYLKRLDEKEAKKYFYQLIDAVDYCHRRGVYHRDLKPENLLVDNQGNLKVSDFGLSVLKKPGQFLSTSCGSPCYVAPEVIQHKSYDGAAADVWSCGVILFELLAGYLPFQDCSLTNLYRRISRAQFVFPQWLSVPQKKIIIRILDPSPITRAKISDIFDDKWLQDHCNPSARIENDDDCDVIEEASTDSDSSHNTEVKETEEMTAETDRFINAFQLIARCSDLDLSGLFQEQKTKLASPHPVQETFDKIKVAAKDVSMAVKRMNSSLVEIQDSKLLPRSNLDLTLSAEVIKVTPAHCVVEVSKSTGDLRSYKEFCRSLSSLLNGGQLSASSSDMECD

SEQ ID NO: 12347 - protein, 170 aa, Campylobacter jejuni
MINSPYIIWLTGLAGSGKTTIGQALYEKLKLKYKNLIYLDGDELREILGHYAYDRQGRIDMALKRAKFAKFLNDQGMMVIVTTISMFNEIYDYNRKQLKNYYEIYIECDMHELMQRDQKGLYTKALNKEIDNVVGVDIEFDKPEADLVINNSCRNNLEEKVELIIKKLAL

SEQ ID NO: 12348 - protein, 455 aa, Arabidopsis thaliana
MNLIRFLLVFQGKIQMNESRKKLNCQSRQFNVDKISDLPEDLLVHILSLLPTTNDIVATSGVSKRWESLWTKVHKLRFNDRIYDGKRYDSFLHFVEKSLILHKAPTLVSLRLSVGPKCTADDIGLWIKLALDRNICELIIKHYPDHGHIRLSRRLCDSKTLVSLKLKNAILGAIWLPTCFISLKTLHLRYVKYSGDESVRTLISSCPSLRNLVVKRHNEDNVKRFAIIVRYLQSLTVYLSPLHGVADSDAYVINTPNLKYLNIKDHYTDLCSFEDMPYLDEANLDVAFTHTENFFESLTSVKKLSLCLKKSNAQYPEGIIFSQLDHLELCTCDDSKWLNILAMLLPDSPKLRVLKLNDKNHDFVDKYCSCTWNQQPSYVPECLTKSLEIFEWRNYKATFRERDVAVYILKNSTCLKKTVISPKLKISGEICDHHIIREDLASLFMGSSSCELKFD

SEQ ID NO: 12349 - protein, 494 aa, Triticum aestivum
MSATCAADLGPLLGAAAANATDYLCNRFADTTSAVDSTYLLFSAYLVFAMQLGFAMLCAGSVRAKNTMNIMLTNVLDAAAGALFYYLFGFAFAFGTPSNGFIGKHFFGLKDMPQTGFDYSFFLFQWAFAIAAAGITSGSIAERTQFVAYLIYSAFLTGFVYPVVSHWIWSVDGWASAARTSGPLLFKSGVIDFAGSGVVHMVGGIAGFWGALIEGPRIGRFDHAGRSVALKGHSASLVVLGTFLLWFGWYGFNPGSFVTILKSYGPPGSINGQWSGVGRTAVTTTLAGSVAALTTLFGKRLQTGHWNVVDVCNGLLGGFAAITAGCSVVDPWAAVICGFVSAWVLIGLNALAGRLKYDDPLEAAQLHGGCGAWGIIFTALFAKKQYVEEIYGAGRPYGLFLGGGGRLLAAHIVQILVIAGFVSCTMGPLFLALKKLGLLRISAEDEMAGMDLTRHGGFAYVYHDDDEHDKSVGGFMLRSAQTRVEPAAAANSQV

SEQ ID NO: 12350 - protein, 232 aa, Zea mays
QSSVQNPKFVTNTTVRPLCIITASDVSHVQTAVRCGRWNGVRLRVRSGGHDYEGLSYRSVQPEVFAVLDLARLRGVQVRPGDDSAWVDAGTTLGELYYAVGTTNPGFLFPGGACATVGVSGFISGGGIGLMMRKYGVGGDNVVDARIVNANGDVLDRFAMGDDLFWAIRGGGGETFGVVVAWRLKLSKVPPTVTVVNVLRTMEQGAADLVAKWETTILQPPVLPDLTIRVVL

SEQ ID NO: 12351 - protein, 273 aa, Lactobacillus johnsonii NCC 533
MKHLTLNNGVKIPIFGFGTYEISPDQTKEAVLSAFKDGYRLIDTAQYYQNEQQVGEAVRASNLNRDEVFITTKTMTDGYEATKQGLDESLNKSGLDYFDLVLIHWPMGHDLDTWRALEEAYKAGKTRAIGISNFNSRQTLELINHAEIRPMVDQIETHLLLQQWKMHEFLKKENIIHESYSPLGNGQQNLMTNPVLQKIGEKYGKSPIQVILRYLVQNDIVTIPRSTNPAHIKANIDIFDFELDKEDLKQLCALDERKPIDGWPAEMREDEDY

SEQ ID NO: 12352 - protein, 236 aa, Oryza sativa (indica cultivar-group)
MRSNGVIPLDYALFRPLPPNKEAVDANTLLHYTNVFDAVVDAAYFAMAYLNVTNVPVMVTETGWPHKGDPSNEPDATSDNADTYNSNLIRHVMNTTGTPKHPGVAVPTYIYELYDEDTRPGSTSEKYWGLFDMNGIPAYTLHLTGSGVLLANDTTNQTYCVAREGADEKMLQAALDWACGPGKVDCSALMQGQPCYDPDNVEAHATYAFNAYYHGMGMGSGTCYFSGVAVITTTDP

SEQ ID NO: 12353 - protein, 443 aa, Haloarcula marismortui ATCC 43049
MLIRNATLPDGRQRDVRVRGESIAEVGRDLDASDQHVIEATGKRLFPGMIDVHVHFRQPGYPHKETWESGSRSAAAGGVTAVVDQPNTDPPTIDGESFDQKAEFAADSVVDWGINGGVTADWIPNVLLRRRLFALGEVFLADSTGDMGIEADLFADALEAATDNDVPVTVHAEDADYFNDDAKARDDADAWSAFRTAKAEEKAVERACEVAQKHDATIHIAHTSTPEGVDIASEAGMTTEVTPHHLLLSRRDLSELGTFGRMNPPLRREKRRQKLYERVVDGTVDMIATDHAPHTREEKDAGIWDAPSGVPGVETVLPLLLAEARDPDSGLTYERVRDLTARNPADVFDIPQKGAIEAGKDADLVLVDTTETSEISGAALHSKCDWTPFEGHDAVFPEWTMVRGTVVYERGDALEADDSTAQEDVFYDHQGENVRGADSERLE

SEQ ID NO: 12354 - protein, 341 aa, Salmonella enterica subsp. enterica serovar Typhi Ty2
MKALSKLKAEEGIWMTDVPEPEVGHNDLLIKIRKTAICGTDVHIYNWDEWSQKTIPVPMVVGHEYVGEVVGIGQEVKGFKIGDRVSGEGHITCGHCRNCRGGRTHLCRNTTGVGVNRPGCFAEYLVIPAFNAFKIPDNISDDLASIFDPFGNAVHTALSFDLVGEDVLVSGAGPIGVMAAAVAKHVGARHVVITDVNEYRLELARKMGVTRAVNVAKESLNDVMAELGMTEGFDVGLEMSGAPPAFRTMLDTMNHGGRIAMLGIPPSDMSIDWTKVIFKGLFIKGIYGREMFETWYKMAALIQSGLDLSPIITHRFSVDDFQKGFDAMCSGQSGKVILSWD

SEQ ID NO: 12355 - protein, 388 aa, Salmonella enterica subsp. VII
QNGKLNVPENPIIPFIEGDGIGVDVTPAMLKVVDAAVEKAYKGERKISWMEIYTGEKSTQVYGQDVWLPAETLDLIRDYRVAIKGPLTTPVGGGIRSLNVALRQELDLYVCLRPVRYYQGTPSPVKHPELTDMVIFRENSEDIYAGIEWKADSADAEKVIKFLREEMGVKKIRFPEHCGIGIKPCSEEGTRRLVRAAIEYAITNDRDSVTLVHKGNIMKFTEGAFKDWGYQLARDEFGGELIDGGPWLKIKNPNTGKEIVVKDVIADAFLQQILLRPAEYDVIACMNLNGDYISDALAAQVGGIGIAPGANIGDECALFEATHGTAPKYAGQDKVNPGSIILSAEMMLRHMQWFEAADLIVKGMEGAIAAKTVTYDFERLMEGAKLLK

SEQ ID NO: 12356 - protein, 481 aa, Streptococcus mutans
MPITNKTMLITYADSLGKNLKELNENIENYFGDAVGGVHLLPFFPSTGDRGFAPIDYHEVDSAFGDWDDVKRLGEKYYLMFDFMINHISRQSKYYKDYQEKHEASAYKDLFLNWDKFWPKNRPTQEDVDLIYKRKDRAPKQEIQFADGSVEHLWNTFGEEQIDLDVTKEVTMDFIRSTIENLAANGCDLIRLDAFAYAVKKLDTNDFFVEPEIWTLLDKVRNIAAVSGAEILPEIHEHYTIQFKIADHDYYVYDFALPMVTLYSLYSGKVDRLAKWLKMSPMKQFTTLDTHDGIGVVDVKDILTDEEITYTSNELYKVGANVNRKYSTAEYNNLDIYQINSTYYSALGDDDQKYFLARLIQAFAPGIPQVYYVGFLAGKNDLELLESTKEGRNINRHYYSSEEIAKEVKRPVVKALLNLFTYRNQSAAFDLDGRIEVETPNEATIVIERQNKDGSHIATAEINLQDMTYRVTENDQTISFE

SEQ ID NO: 12357 - protein, 488 aa, Listeria monocytogenes str. 4b F2365
MADVRKLKNYINGEWVESRADKYEDVINPATGEVLCQVPISTRAELDQAAVIAEQAFEKWSQVAVPRRARVLFSFQQLLIQHKEKLARLITLENGKNLSEARGEVQRGIENVEFAAGAPTLMMGDSLASIATDVEAANYRYPVGVVGGIAPFNFPMMVPCWMFPMAIALGNSFILKPSERTPLLMEKLVELFSEAGLPKGVFNVVYGAHDVVNGILENEIIKAVSFVGSKPVGEYVYKTGSANLKRVQALTGAKNHTIVLNDADLEDTVTNVISAAFGSAGERCMACAVVTVEEGIADEFLAALRTAAQNVKIGNGLDDGVFLGPVIREENQKRTIAYIEKGLEEGAKLTVDGRETGLSEGHFVGPTILEDVTTDMTIWKDEIFAPVLSVIRVKNLQEAVRVANQSEFANGACIFTNNAKAIRYFREKIDAGMLGVNLGVPAPMAFFPFSGWKSSFYGTLHANGKDSVDFYTHKKVVTARYSLKGYEE

SEQ ID NO: 12358 - protein, 388 aa, Salmonella enterica subsp. houtenae
QNGKLNVPENPIIPFIEGDGIGVDVTPAMLKVVDAAVEKAYKGERKISWMEIYTGEKSTQVYGQDVWLPAETLDLIRDYRVAIKGPLTTPVGGGIRSLNVALRQELDLYVCLRPVRYYQGTPSPVKHPELTDMVIFRENSEDIYAGIEWKADSADAEKVIKFLREEMGVKKIRFPEHCGIGIKPCSEEGTRRLVRAALEYAITNDRDSVTLVHKGNIMKFTEGAFKDWGYQLARDEFGGELIDGGPWLKIKNPNTGKEIVVKDVIADAFLQQILLRPAEYDVIACMNLNGDYISDALAAQVGGIGIAPGANIGDECALFEATHGTAPKYAGQDKVNPGSIILSAEMMLRHMQWFEAADLIVKGMEGAIAAKTVTYDFERLMEGAKLLK

SEQ ID NO: 12359 - protein, 181 aa, Brassica napus
MASSMLSSAAVATSPAQATMVAPFTGLKSSAAFPVTRKSNTDITSIANNGGRVSCMKVWPPVGKKKFETLSYLPDLTDVELAKEVDYLLRNKWIPCVEFELEHGFVYREHGSTPGYYDGRYWTMWKLPLFGCTDSAQVLKEVQECKTEYPNAFIRIIGFDNNRQVQCISFIAYKPPSFTGA

SEQ ID NO: 12360 - protein, 222 aa, Pseudomonas wisconsinensis
MSIRRLACSLLLSSLALPVLAAECPAMLQGELPKLRAKGENIELCQYAGKPLVVVNTASFCGFTPQFKGLEALYQRYKDQELEVLGVPSDDFRQESADSKETATVCYVNYGVTFAMTEPQPVSGANAIPLFKGLAEQSRQPRWNFFKYVVDRQGKVVASFSSLTKPDDPELIAARREGDRLATLIPSRFTALHPSGRWALSVCLPRLARRRTQFTRRALQEQ

SEQ ID NO: 12361 - protein, 205 aa, Sulfolobus islandicus
YSIAKLASHKLWNLLNTEPYIATFGALTGSQAVEMAKAGLKAIYVSGWQVAADNNLSNQTYPDLSLYPSNSVPNLVKRLNNALLRADQISWSEGKRDIDYLLPIVADAEAGFGGPIHAFELTKALIEAGAAGVHFEDQLAAEKKCGHLGGKVLIPISAFIRVLNAARLASDVLGVPTILIARTDALNAKYLSNDVDETDNQFLTG

SEQ ID NO: 12362 - protein, 153 aa, Brassica napus
VHNRCPTCRQELGDIRCLALEKVAESLELPCKFYNLGCPEIFPYYSKLKHESLCNFRPYGCPYAGSECGVVGDIPFLVSHLRDDHKVDMHAGSTFNHRYVKSNPREVENATWMLTVFHCFGQYFCLHFEAFQLGMGPVYMAFLRFMGDEEEAR

SEQ ID NO: 12363 - protein, 175 aa, Triticum aestivum
MAPTVMASSATSVVPFQGLKSTVGLPVSRRSNGASLGSVSNGGRIRCLQVWPIEGIKKFETLSYLPPISREALLKQVDYLIRSKWVPCLEYSKVGFIFREHNASPGYYDGRYWTMWKLPMFGCTDATQVINEVEEVTKEYPDAYVRIIGFDNMRQVQCVSFIAFKPPGCEESGKA

SEQ ID NO: 12364 - protein, 318 aa, Zea mays
  misc_feature (144)..(144): Xaa can be any naturally occurring amino acid
MMDPALLDDVIRRLLEVKNLKPGKNAQLSESEIKQLCAAAKEIFLHQPNLLELEAPIKICGDVHGQYSDLLRLFDYGGYPPQANYLFLGDYVDRGKQSLETICLLLAYKVKYPENFFLLRGNHECASVNRIYGFYDECKRRFSXVKLWKTFTDCFNCLPVSALIDEKILCMHGGLSPELNKLEQILNLSRPTDVPDTGLLCDLLWSDPSNEATGWAINDRGVSYTFGPDKVSEFLEKHDLDLICRAHQGGEDGYEFFASRQLVTMFSAPNYCGEFDNAGAMMSVDETLMCSFQILKPARKVLGGSTNNKSGFKSLRGW

SEQ ID NO: 12365 - protein, 476 aa, Triticum aestivum
  misc_feature (240)..(240): Xaa can be any naturally occurring amino acid
ENGREEVGVMGVSSGGADGDEEQHGGGKFSVTSFLWHGGSVWDAWFSCASNQVAQVLLTLPYSFSQLGMLSGILLQLFYGFLGSWTAYLISVLYVEYRSRKEKEGVSFKNHVIQWFEVLDGLLGPYWKAAGLAFNCTFLLFGTVIQLIACASNIYYINDRLDKRTWTYIFGACCATTVFIPSFHNYRIWSFLGLGMTTYTAWYLAIAALINGQVEGVTHTGPNKLVLYFTGATNILYTFXGHAVTVEIMHAMWKPAKFKYIYLLATLYVFTLTLPSASAMYWAYGDELLAHANAFSLLPKTAWRDAAVILMLIHQFITFGFACTPLYFVWEKVIGMHDTKSVCLRALARLPIVVPIWFLAIIFPFFGPINSAVGALLVSFTVYIIPALAHMLTYRSASARANAAEKPPFFLPSWTGMFVLNAFIVVWVFVVGFGLGGWASMVNFIRQINTFGLFAKCYQCPKPGAAVAPGPSSLHH

SEQ ID NO: 12366 - protein, 374 aa, Chlamydomonas reinhardtii
MHAALQIGGCSAAGFAPVRCGGRKASALATPVRGCQLGCGASAQSPMRAGAALGPRRSGRRTAVVCRAAAKNFYDILGVSASATDRDIKSAYRKLAMKLHPDVNKAPDAQKRFMEVKVAYETLSDAKQRAEYDRRLRGGYAGGRTGYSGSSSSSGYGGAYGGNSAGNWGSSYGTGGGNYGNYTQEPLPGLDDLIKELEKEYTAWVRERATKTGPGGRPKTLAEELEDLGGEFLDFLEEALGIKEEAGSSSSSSAGGNGSSSSTGAAAGAAFRETSKSAAEQFDAWWQQYGDGSPLGGAGGSSGAGASPAGSRSTSSGASASSSSSASSSSSQQRRQQAPPPPPPRPPPPPPPKKSREEEIDAELLALKKKLNKL

SEQ ID NO: 12367 - protein, 205 aa, Sulfolobus islandicus
YSIAKLASHKLWNLLNTEPYIATFGALTGSQAVEMAKAGLKAIYVSGWQVAADNNLSNQTYPDLSLYPSNSVPNLVKRLNNALLRADQISWSEGKRDIDYLLPIVADAEAGFGGPIHAFELTKALIEAGAAGVHFEDQLASEKKCGHLGGKVLIPISAFIRVLNAARLASDVLGVPTILIARTDALNAKYLSNDVDETDNQFLTG

SEQ ID NO: 12368 - protein, 422 aa, Staphylococcus aureus subsp. aureus MSSA476
MTAEKITQGTEGLNVPNEPIIPFIIGDGIGPDIWKAASRVIDAAVEKAYNGEKRIEWKEVLAGQKAFDTTGEWLPQETLDTIKEYLIAVKGPLTTPIGGGIRSLNVALRQELDLFTCLRPVRWFKGVPSPVKRPQDVDMVIFRENTEDIYAGIEFKEGTTEVKKVIDFLQNEMGATNIRFPETSGIGIKPVSKEGTERLVRAAIQYAIDNNRKSVTLVHKGNIMKFTEGSFKQWGYDLALSEFGDQVFTWQQYDEIVEKEGRDAANAAQEKAEKEGKIIIKDSIADIFLQQILTRPAEHDVVATMNLNGDYISDALAAQVGGIGIAPGANINYETGHAIFEATHGTAPKYAGLNKVNPSSVILSSVLMLEHLGWQEAADKITDSIEDTIASKVVTYDFARLMDGAEEVSTSAFADELIKNLK

SEQ ID NO: 12369 - protein, 142 aa, Streptococcus thermophilus
MLNKIQHRNLNTYSVTPFDFFEEFSRNLFNDFKPNFIKTDIHETDNEYLVEAELPGIPKENIQVTYENGVLTISGQRQIDAVNEDKKGKLIRSERSLTSVQRQYLLENVKEDEIKASYSDGVLKVTLPKDSNKEIKKSISIE

SEQ ID NO: 12370 - protein, 426 aa, Clostridium thermocellum ATCC 27405
MLIKGGHVVDPKTNTNGIMDILVEDGIITEIGKDIEISNGDIIYAEGKLVLPGLVDAHCHLRDPGFEYKEDIETGTMSAAMGGFTSIACMPNTDPVCDNKAVVKYIINKAKQDGYVNVYPIGAISKGQKGEELSEIGELKFAGAVAISDDGKPVKSSSLMKRALEYSSMFDIAVISHCEDLDLADGGVMNEGYWSTVMGLKGIPSAAEEIMVARDIILSEYTKVPIHIAHVSTELSVELIRNAKKRGVKVTCETCPHYFVLTDEACKDFNTLAKVNPPLRTRRDVEAVIEGLKDGTIDIIATDHAPHHADEKNVEFNLAANGMVGFETALPLAITYLVKPGHLTISQLVEKMCVNPSKLLGINKGTLETGRSADITIVDLNEEFVVDVNKFKSKSKNSPFHGFKLNGSVYYTLVNGNVVVREKVLL

SEQ ID NO: 12371 - protein, 256 aa, Triticum aestivum
MAAKCYPTVSDEYLAAVAKAKRKLRGFIAEKNCAPLMLRLAWHSAGTFDVATKTGGPFGTMKCPAELAHGANAGLDIAVRLLEPIKEQFPILSYADFYQLAGVVAVEVTGGPEVPFHPGRQDKPEPPPEGRLPDATQGSDHLRQVFSTQMGLSDQDIVALSGGHTLGRCHKERSGFEGAWTANPLIFDNSYFTELLSGEKEGLLQLPTDKTLLTDPAFRPLVDKYAADEDAFFADYAEAHLKLSELGFGEAVEGCC

SEQ ID NO: 12372 - protein, 396 aa, Yarrowia lipolytica
MTFHSLVNKVSGQPPSYNKKADYKFGKTLGSRYFGIVKYAKQHSTGEEVAVKIIVKKNLKGNDHVVIEELSLLKECHHPHIIAFKDWFESKEKFYIVTQLATGGELFDRICDYGKFTEKDARQSVKDILEAVDYLHSKDIVHRDLKPENLLFVTPDPHASLVLTDFGIAKHLKSPDEVLHSMAGSFGYAAPEVLKGTGHGKPCDIWSLGVITFTILSGYSPFRSETVRDFLEEIEGPNALVFHKKYWQDVSEDAKDFIKSCLALDPALRPTSAELLKHEWITGDTTKSIDLLPNIREGFNARSKFRQAIEAVRLHNRIKSLNMVDSDDEDEEEEAVADTEKPSLLSVASSMRPRAHSRSKSGTGAAAFQEVVLAAKRNKELLEKEKASKQDAAEEK

SEQ ID NO: 12373 - protein, 381 aa, Staphylococcus aureus subsp. aureus COL
MLTEQEKDIIKQTVPLLKEKGTEITSIFYPKMFKAHPELLNMFNQTNQKRGMQSSALAQAVMAAAVNIDNLSVIKPVIMPVAYKHCALQVYAEHYPIVGKNLLKAIQDVTGLEENDPVIQAWAKAYGVIADVFIQIEKEIYDQMMWIGFKPFKITNIKQESEDIKSFTVETEEYDFSEFTPGQYITVDVSSDKLPYRAKRHYSIVSGEKNHLTFGVKRDVTTEHEGEVSTILHDEIKEGDMINLAAPVGGFVLENTTEPQLFLGSGIGVTPLVAMYEAASAKGLDTQMVQVAENEQHLPFKDNFNSIASHHDNAKLYTHLKDKQGYIGAEELQVFLANKPEIYICGGTKFLQSMIEALKSLNYDMDRVHYETFIPRLSVAV

SEQ ID NO: 12374 - protein, 435 aa, Arabidopsis thaliana
MKAPRLGSEEVSYSDRISYLPDDLLLRILSFIHTSDAISTSLLSKRWKFVWKMMPTLDLDEDSCRNIGTLRFDEGCCMFLKSHEAPVLTSLNLKLMTPSHDIDRLLSNIKPILHEITITSYRYSTIRFPRNLNVCQTLVVMKLQDKVLVDVSFPVCFRSLKSLHLTRVKYSCRESFTTLLSACPVLEDLDLFIGRVHYDCLNSFTIWVPSLQRLSICDESYRFRSTTFEISVPSLKYLKIACQDSCFKFVEDMPNLVEAHVEANQHETKNLLRFLTSVERLKDPDLTDRIFHQLLYLELHLHKRLNGDRILSLLKHSPNLQTLKLNEKPLRSIKDQPNISVRKPNSVPECLTFHLETLEWQGYAGRPEDKEIAVYILGNALRLNTATISRYFSSSRFRHHQKKDLKIVEELKSITKASTSCQLVLQQFIEIKYSM

SEQ ID NO: 12375 - protein, 178 aa, Glycine max
MQHRNLTSGRPSGTDGSDYSYRMVVDSRYQLVAKGKKRLSLYFITEAVLLLIGVTLTYLPGIEADAPNTVAYSSVIVSVVSLIIGNIGRRRSRSGLLRFYAAVSSIAMLLLIASLAQQHLLLKAIQDSKLWKTGKYDVNELSHFQIGLLLYMVTLSVLKLCTVNAVVSLLFNMALNPH

SEQ ID NO: 12376 - protein, 388 aa, Salmonella enterica subsp. diarizonae
QNGKLNVPENPIIPFIEGDGIGVDVTPAMLKVVDAAVEKAYKGERKISWMEIYTGEKSTQVYGQDVWLPAETLDLIRDYRVAIKGPLTTPVGGGIRSLNVALRQELDLYVCLRPVRYYQGTPSPVKHPELTDMVIFRENSEDIYAGIEWKADSADAEKVIKFLREEMGVKKIRFPEHCGIGIKPCSEEGTKRLVRAAIEYAITNDRDSVTLVHKGNIMKFTEGAFKDWGYQLARDEFGGELIDGGPWLKIKNPNTGKEIVVKDVIADAFLQQILLRPAEYDVIACMNLNGDYISDALAAQVGGIGIAPGANIGDECALFEATHGTAPKYAGQDKVNPGSIILSAEMMLRHMQWFEAADLIVKGMEGAIAAKTVTYDFERLMEGAKLLK

SEQ ID NO: 12377 - protein, 291 aa, Lactobacillus johnsonii NCC 533
MTEVPTITLNDGNKMPLLGLGVFQIPDHEKARQTVEMALANGYRMIDTAEVYENQIAVGEAIAESAVNRDDIFLTTKIWVSNMSFEKATKAIDHDLKELGTDYLDLVLLHQPYGDTFGAWNALAAAKRAGKVRSIGLSNFYPDQYMNLELAHEDKPAINQIEINPWFQQTNDVKFFQGRDVVVEAWAQFAEGKHDIFNNKTLKEIADAHHKTTAQVILRWLTQQDIVVIPKSVHEKRQKENLDIFDFELTKDEMDKIKGLDKGVSQFFDHRDPAVIDDIFGESLKQLRDSE

SEQ ID NO: 12378 - protein, 337 aa, Streptomyces kanamyceticus
MSSRAIVVERPGAHRLVTRGTPTPGPGEVLVRVAAAGICGSDREVYDGHRDAAYVRYPVIPGHEWSGTVAAVGEGVDPGLLGRRTVAEGFRACGVCERCRCAETNLCTGGYAETGFTEPGAFADHLTVPARLLHLLRDDADLRAAALLEPAAVVAAAVRAGGLRPGERVAVVGAGTLGLLAVQLLAASGPGELVVVDPRGARGARARECGATSALSPVAAESVRGSFDLVVETAGAPTTAASSCLLARRGGRVVLTGMFTEGAVGIDPVHLSLSQLEVRSVFGASSAAWGDAVRAFGLGLIDPAALITHEFPLERFGEAVSLVGGGDPKTGKVLLRP

SEQ ID NO: 12379 - protein, 383 aa, Pyrus pyrifolia
MSSSNAVGATSHELLGAQAQLWNHIFQFINSMSLKCAVQLGIADVIHNHGQPISLSELIAGLNVHPSKAHFVSRLMLILVHSNFFAQHHHVHHDRADVEEEEAVVLYSLTPSSRLLLKDGPFSTTPFLLATLDPVVTTPFHLMGAWLKINGGDDPGATCTPFEMENGMPFWELGAQEPRFGNLFNEAMEADSKLIGRVVVEECGGVFEGLKSLMDVGGGSGTMAKAIANAFPNINCTVFDQPHVVAGLQGTTHNLGFMGGDMFEEIPPANAILLKWIMHDWNDEESVTILKKCREAISLSKNEGGNKKIIIIDIVVGYVDNKKKMMDKKSIETQLMFDMLMMSILPGKERSKLEWEKIFFSAGFTHYNITHTLGLRSLIEVYP

SEQ ID NO: 12380 - protein, 388 aa, Salmonella enterica subsp. diarizonae
QNGKLNVPENPIIPFIEGDGIGVDVTPAMLKVVDAAVEKAYKGERKISWMEIYTGEKSTQVYGQDVWLPAETLDLIRDYRVAIKGPLTTPVGGGIRSLNVALRQELDLYVCLRPVRYYQGTPSPVKHPELTDMVIFRENSEDIYAGIEWKADSADAEKVIKFLREEMGVKKIRFPEHCGIGIKPCSEEGTKRLVRAAIEYAITNDRDSVTLVHKGNIMKFTEGAFKDWGYQLARDEFGGELIDGGPWLKIKNPNTGKEIVVKDVIADAFLQQILLRPAEYDVIACMNLNGDYISDALAAQVGGIGIAPGANIGDECALFEATHGTAPKYAGQDKVNPGSIILSAEMMLRHMQWFEAADLIVKGMEGAIAAKTVTYDFERLMDGAKLLK

SEQ ID NO: 12381 - protein, 502 aa, Triticum aestivum
MVATAKIPQRQLFIDGDWRAPALGRRLPVINPTTEASIGEIPAGTSEDVDAAVAAARAALKRNRGRDWSRAPGAVRAKYLRAIAAKMIERKSDLARLEALDCGKPLDEAAWDMDDVAGCFEFFAGHAEALDKRQNAAVALPENFKCHLKKEPIGVVALITPWNYPLLMAVWKVAPALAAGCTAVLKPSELASLTCLELGDVCKEIGLPSGVLNIVTGLGHEAGAPLSSHPDVDKVAFTGSYATGQKIMVAAAPTVKPVTLELGGKSPIVVFDDVDIDKAVEWTLFGCFWTNGQICSATSRLLIHKNIAKEFVDRMVAWSKNIKVSDPLEEGCRLGPVVSEGQYEKIKKFVANAKSEGATILTGGVRPKHLEKGFFIEPTIITDINTSMEIWREEVFGPVLCVKEFSTEEEAIELANDTHYGLAGAVISGDRERCQRLAEEIDAGCIWVNCSQPCFCQAPWGGNKRSGFGRELGEGGIDNYLSIKQVTEYTSDAPWGWYKAPA

SEQ ID NO: 12382 - protein, 388 aa, Salmonella enterica subsp. arizonae
QNGKLNVPENPIIPFIEGDGIGVDVTPAMLKVVDAAVEKAYKGERKISWMEIYTGEKSTQVYGQDVWLPAETLDLIRDYRVAIKGPLTTPVGGGIRSLNVALRQELDLYVCLRPVRYYQGTPSPVKHPELTDMVIFRENSEDIYAGIEWKADSADAEKVIKFLREEMGVKKIRFPEHCGIGIKPCSEEGTKRLVRAAIEYAITNDRDSVTLVHKGNIMKFTEGAFKDWGYQLARDEFSGELIDGGPWLKIKNPNTGKEIVVKDVIADAFLQQILLRPAEYDVIACMNLNGDYISDALAAQVGGIGIAPGANIGDECALFEATHGTAPKYAGQDKVNPGSIILSAEMMLRHMQWFEAADLIVKGMEGAIAAKTVTYDFERLMDGAKLLK

SEQ ID NO: 12383 - protein, 324 aa, Streptomyces kanamyceticus
MAAQTLRAAARMRVVELIGDKERTAAEVAAEAGARPEGMIRLLRALAGIGVVAERTPGVFAVTPTGALLDSRRPGNVASLVLMMSDPTMLRGWEHLDEVVRTGEPAFDTVFGTDFFGHLREHPEESARFNEAMSQSTGAAAATLPRAFDFTRFATVADVGGGDGTLLSAVLKEHTGLTGIIYDTAEGLAQAPATLERHGLTERCSSVAGDFFQSAPKGADLYLLKSILHDWPDERAVTILSHCRAVLPPEGRVLILEHVLPEAVDPAAPGFAYLSDLNMLVNLGGRERTRADFDELCGRAGLSIVSVTPMGAPNPLSMIEVAAA

SEQ ID NO: 12384 - protein, 1265 aa, Neurospora crassa
MTWHAQLALVLALVCPAAASCSGKSDACSSNPIPLRQFNALNYQADTCNLKWNRGCTSLDKHGVLQQKPPPYSLCNSGHQPAGLIPVDAYTLSLQNNNFAPGSAKWTLHGLWPGSVDGTGGKNQPYGCLNGEGFNETILTTFDGLLNYFWPTNAKFNNTMQCFILSEWMKHGTCAVIPGADGTAFRLPQEDYFRTAFVIANEFNESPTLRNQLLEKVKLDDVEPLISTRCVQCAYLATVGWTGTDVASVPRMSGDCIDQCFECGDFWDTCPPAQLESTVMLNSSNAPREKRDSSSTSNATASFPLLEFAMPAFMSSENTSPWEGTWRSFGAEEGGSGKFEFAQTFTDNVLTVTTDSPYPRTCTYERRGPKELVLRCGGDHLEDCLVQRLPDIGGLEAAFLACNHTGEPAPASFYAAMDTKGCGNFLMFRCKASAAGCSFSPDAISASEPKTETKTEPESGFESESKPSPVSHFQPGIAGAPPALLGSWRSLQVSSDYEEGLAQWNFTADGQASLRWPNYPNRAVQRYSVSHSDEDPSLVLLASASGTITTCRFQFQYQPVYSYAVLDCGAAVDNEEVTQVTKWAMGRCNPCSAHCRYSCGPENDFCGAGSCDPAESVEAASVDALPSLFDITRATLKDGHDWCTPEDSGCWPTKTAIRKLEQELDPTVPRLGLRWHSYPDPQPAPVPMGSIDNQSFYGLGNAPQGLKALYYYEDIAEMQRPCFNQADPPAVYNTASDMCKAAVHQNEYRNWNPFIVVFPLNERHVVAALNFAARHRLCIATAGTGHEYNSRNSCPTGGILIRTILLKDKTFMPTWPEDSTLAPAGAFRFGAGSTFAEMHAFSKDYSRVISSGWCSTVGMVGFHLGGGHGPFAPSMGLGVDNVLEIEVLQVGRNTYGQPVVHKKIASRNRNPQLFWAMRGGGGSVWGVVLSMTIRAHPVPDGGLSRVYMSQTGTFCPDDSSKFGYQWLRGMWTRFTAWQLSLNQKVSTQPGFFINTTLYNEKRNLCSVTWEFKFEYFYAGGQAEQDYIRFRDGLKDVLQTDTVWEDNYKSAYDYLVSMAADKFTLVPVNPLPAQHPPSDVATGSQNSVLVSRQALKTKFTSTMMDVLDICVKSLKNPDKTSPDVSGYRCGFHYLYTSLTGNLGSTQPGDTAISPGFRSALMLWNARTLTTQQSNDTVYKLGPNSYFSESSYVMHNWTARYWGEKAYEQLLGVKKAHDPGNHFWCHHCVGDNPDDAFGEPLGAAAQADFGDQPDAAAQAEFVEQEKL

SEQ ID NO: 12385 - protein, 167 aa, Glycine max
  misc_feature (128)..(128): Xaa can be any naturally occurring amino acid
MAAAFASRCSRVGRSLSGGLSNSSPGLFTSSHGMTCNNLFSQQQRTFIQMRTVLKVVDNSGAKKVMCIQALKGKKGARLGDTIIASVKEAHPNGKVKKGKVVYGVVVRAAMILTFAGHSEVKFNDNAXVVLVMKSSVTSAICVFGPVPHELRQKKHVKILTLAGHIA

SEQ ID NO: 12386 - protein, 199 aa, Zea mays
  misc_feature (16)..(16): Xaa can be any naturally occurring amino acid
  misc_feature (29)..(29): Xaa can be any naturally occurring amino acid
  misc_feature (38)..(38): Xaa can be any naturally occurring amino acid
  misc_feature (47)..(48): Xaa can be any naturally occurring amino acid
  misc_feature (55)..(55): Xaa can be any naturally occurring amino acid
  misc_feature (63)..(64): Xaa can be any naturally occurring amino acid
  misc_feature (71)..(72): Xaa can be any naturally occurring amino acid
  misc_feature (74)..(74): Xaa can be any naturally occurring amino acid
  misc_feature (89)..(89): Xaa can be any naturally occurring amino acid
  misc_feature (116)..(116): Xaa can be any naturally occurring amino acid
  misc_feature (129)..(129): Xaa can be any naturally occurring amino acid
  misc_feature (132)..(132): Xaa can be any naturally occurring amino acid
  misc_feature (136)..(136): Xaa can be any naturally occurring amino acid
  misc_feature (141)..(141): Xaa can be any naturally occurring amino acid
  misc_feature (143)..(143): Xaa can be any naturally occurring amino acid
  misc_feature (149)..(149): Xaa can be any naturally occurring amino acid
  misc_feature (155)..(155): Xaa can be any naturally occurring amino acid
  misc_feature (169)..(169): Xaa can be any naturally occurring amino acid
  misc_feature (178)..(178): Xaa can be any naturally occurring amino acid
  misc_feature (183)..(183): Xaa can be any naturally occurring amino acid
  misc_feature (186)..(186): Xaa can be any naturally occurring amino acid
ESHTTGGESDQQKRPXPSGGPQAGAAGHXARSGAQQGXRAATAGPRXXDDGAGTXGSAGGKRXXEAGKTDXXEXEATDHSGGRKHKTNXAGSNDEAGANRAEGENGGKTNPSRPSXNATPKRRNGRTDXDYXAQNXDKEDXGXHEEDHXQKRSEXADSAEEKGEKHAAXAHARGRDDXTSPAXQRXNEHQPNGPATPAD

SEQ ID NO: 12387 - protein, 253 aa, Glycine max
LGHVIDKLSVSFGLEILKVVPGYVSTEVDARLSFDTAATIARAHRIIDLYEKAGIKKDRVLIKIASTWEGIQACKHLQKEGISCNMTLLFGFAQAVGCAEAGATLISPFVGRILDWHKAKTGKSSYESHEDPGVVSVTKIYQYYKKYDYKTIVMGASFRNTGEITELAGCDRLTISPGLLEELAKSTSKLDKKLDPETAAKAYTGEKVSYDEKGFRLSMNEDAMATEKLAEGIRGFSADIVKLEQILKAKLSA

SEQ ID NO: 12388 - protein, 182 aa, Burkholderia cepacia R18194
MLWLTGLSGAGKTTLADAVAARLSDRCMHPVVLDGDRLRTGLNRDLGFTVQDRFENVRRIAEVAALLSESGALAIVAVISPLAAMRDEAKAIVGPAFREVYVSTALACCETRDPKGLYAKARRGALPEFTGVSAPYEPPVAADLEIDTGRASLATCVDTLMQFACAQFVRAADARAALMRHG

SEQ ID NO: 12389 - protein, 345 aa, Methanosarcina mazei
MHHNVFTNTPTIPIDVKDRSVSELMDGMLRTGFQGRKLAESVQAWSNMLKEKDTTVLMGLSGAMVPAGMRRVISYLIRERMIDCLVSTGANLFHDSHEALGRKHYVGSHLANDEKLFEHGVDRIYDVFAVEEEFRNADNLIADFAEEIGEISCSSREFMYLLGKELVRRGAAEDSIVVSAYRHNVPIFVPALSDSSIGIGLTIARRRGLKLEIDQIKDVDEITQIVEKSGHTGVVYVGGGVPKNFIQQTEVIASILGMDVPGHEYAIQYTSDSPHWGGLSGCTFDEAVSWGKVAAQAKKVQVFVDATIALPIVAHALHEKTRGVKRTAPVFSWDGPEGLEIAYNE

SEQ ID NO: 12390 - protein, 290 aa, Brassica napus
  misc_feature (54)..(54): Xaa can be any naturally occurring amino acid
KKRPLFDTSNTWAFVFGLMGNGGSFAVFLSPVPTFYRVWKKKTTEGFQSLPYVXLFSATLWLYYATQKKDVFLLVTINSFGCFIETIYISIFLAFAPKKARMLTVKLLLLMNFGGFCLILLLCQFLAKGITRAKIIGRPTRPICVGFSVCVFAAPLSIIRTVIKTRSVEYMPFSLSLTLTISAVVWLLYGLALKDIYVAFPNVLGFALGALQMILYVVYKYCKTPPHLGEKEVEAAKLPEVSLDILKLSTVSSPEVRQANKCTCGNDRRPEVEDGQNAKNGKQSSSASAT

SEQ ID NO: 12391 - protein, 336 aa, Pyrococcus furiosus
MPKPKEYVLKKSEEIEGTKVEGPWLDDTKSLEEVVSLYTQIGFQATHLGKAIEIWRKIEEKREKGEEIRVFLGYTSNIVSSGLREIIAWLVKHRKVDVIVTTAGGVEEDFIKALKPFILGDWIVNDAELRKKGINRIGNIFVPNDRYIEFEKYMIPFFERILEIEREKGRPLTASEFIYELGRFMDEKLGKEKEKSIIYWAYRNEIPIFCPAITDGSIGDMLYFFKEERRDRELIIDIANDIVKLNNLAVTAKETASIILGGSLPKHAIINANLFRGGSDYAIYITTAVPWDGSLSGAPPSEGVSWGKIRAKADYVEIWADATLVFPILVWMVMKR

SEQ ID NO: 12392 - protein, 113 aa, Bartonella sp. Ac1692yn
ANEACLKMLQEIGSIKRIPEFIARAKDKNDPFRLMGFGHRVYKNYDPRAKIMQKTCHEVLKELNIQDDPLLDIAIELEKIALSDEYFIEKKLYPNVDFYSGITLKALGFPTEM

SEQ ID NO: 12393 - protein, 1188 aa, Neurospora crassa
MEWLSEFHTHLWKRAAEELNKNIKLINESDDPRIGSGRDGASGGTLSHSSGDNKDPASLSALGSTFVPVLVYAAICLLIFFTFRRISTRTYAPRTIAQLREPEHPAQTLPNGWIDWVKPFWKIDDDYILNNCSLDGYLFLRFLKILSVICFAGLAISWPILLPINATGGNLQRQLDKLTMGNIKLPSKYYAHVVVAWLFFGFVLFMVCRECIYYINLRQAYLLSPNMSNRLSARTVLFTCIPKPYLDEAKLRKLFGDSVKNIWIPKNTNYLRGLVEDRDDVAERLEKAEIELIKKANTVRMKNIREGKGAPPFAGEPAIDDLQSSKTSSSSLHESNESTQDGDLEKGTEPNPVRIRERRTEAPPIPVDEIETPALPGDDPGAPKKSKDDDLGPEYQHPYGYPASLPDVRGSVAALFVRANDRPHHRPLHNFGRRVDTIRWTRARLKVLNRDIWKLRRKFRAGDGQPLSSAFVEFDSQASAEAAYQILSHHQPMHMSPRYIGVRPEQVIWSSLRIRWWEQIMRQFLMLALVVVAIIFWSIPSAAVGIISNIDFLSEKVPFLFWIPLLPKVILGVIKGLLPAVALSMLMAIVPAGLRVCARVAGCPSHALVELYCQSAYFAFQVIQVFLVTTITSAASAAIIDVIKQPMSAPNLLAQNLPKASNFYLSYILVQCLGAGAGKLANVSDLLRHYVATSFMVDPRKAYHRWRKLTPIHWGAVYPRFTNMGVIALAYSCISPLILVFAGFGMLFVGLVYRYNLIYIHDDSELDTKGLLYPRALLHLMVGLYIAEICLIGLFALKKAFGPMLLMILFFGFCAITHYSLSSALSPLLASLPQTLALEKQHGQIAEDGDGDDHDINPVSRPTPSDPTSAQGGGGLAADYYNDTSISTPGADIPAEVIGGSAADYYASISFDYSDPSTDDPEPPGLYDDDFDSDGPQSQRMRGLEGSSSIRHSITEFAKTTLKSQLSNLKASANGTGPPGRLSPFTRFLYRIHRFLTPDPSIQNPNLIQRWLHPSVYADFRTLAKKVGNGPGPDGWELPKGYENKRGYYPPEMWKPAPRLWIPRDTGRVSRQEVRHNRDAGVWCTDVGCWLDDGVGEAPWDDGKDKRGSSEDSEKGVEGENMRGTEAEPESKEGKAMDLEDGKKVNRKGIWKGVGKEAKKATGRVKPGRVRVRFNVEEGPMGEERWLF

SEQ ID NO: 12394 - protein, 483 aa, Acinetobacter sp. ADP1
MQHVQLLIDGQSVDAANQATFERISPIDGHVASVAAAATLEDVDRALESASRAFQIWSKVSPTERRLRLLKAADLMDQNTEKFIEIGMRETGSTATWYGFNVHLAANMLREAAAMTTQIDGSLIPSDVPGNLAMGIRVPCGVVVGIAPWNAPVILPTRALAMPLACGNTVVLKASEACPATHRLIGAILNEAGLGEGVVNVITHAPQDAPQVVERLIEHPAVKRINFTGSTKVGKIIAETAAKHLKPVLLELGGKAPVVILNDADLDEAVNAVAFGAFFNQGQICMSTERVLVQDGIADRFIEKLIQKTASLKAGNPTQQGSMLGVLESRRAAERIQHLLEDAQQKGANLPLGIQIQDTLMQPTLVLDIQPEMLLYREESFGPVCTVQRFASIEDGVRLANDSEFGLSSAVFSQNFGLAMDVAKQIDSGICHINGATVHDEAQMPFGGTKSSGYGRFGSKASIAEFTELRWITVQTQPRHYPI

SEQ ID NO: 12395 - protein, 447 aa, Methanosarcina acetivorans C2A
MTEIGIVAVGGYNEMGRNMTAIIIGEDIVILDMGLRLDRVQIHEDVEIDKMHSLELIEMGAIPDDTIMKEINGTVRAIVCTHGHLDHIGAIPKLAHRYNAPILATPYTAAIIKQQIESERKFEVCNRVIPLPAGGTYQVTEDISIEFIRVQHSIIDCILAAVHTPAGAVLYACDFKLDRTPTMGEAPDFDRFKSLGKEGVIAMITESTNAGRSGKTPSEQIAKDMVRDVLLGTEESDVGMIITTFASHIARLKAIIEAAEEMGRIPVLMGRSMERYVGAARDLGYLELPSNVEIYGMRKDIDRAFKRIMQDGKNKYLPIVTGHQGEPGSILVRVANGETPYTIEPGDRIIFSANVIPSPMTQANRYALETKLKMKGGRIYDNVHVSGHAYREDHWELLRMVNPEHVIPAHGDMEMHGHYIEMAEDAGYVLGDTVHLLRNGEVLYIEE

SEQ ID NO: 12396 - protein, 492 aa, Gibberella zeae PH-1
MAEITITGAGGRKIQIPTGLFINNRFIPSTTSETLTTENPTTNTPLGQVSAAQPSDVDAAVSSSKEALKTWKTSQPAERRRLLNRLADLIERDARELASIEAIDAGMLFNMSLGFCIVQAVETLRYFAGWADKIDGQSLEFDQGLAYTKREPIGVCAAVVPWNTPLLITAWKLGPALAAGNTLIIKTPELAPLYGQKLAQLVLEAGFPPGVVNIITGLGPVAGQALADHHQVRKISFTGSLAVGRTILVSAAKSNLKRVTLELGGKGPSIIFNDANFENALAFATAGITMHNGQICAAGSRIYVQADVYDRFVSEFAAKTRDAVMGDPLLDDTVKGPVISSTQKNRIMEYITKAKSEGIELLHGSAEPDSKGNFVPNTAFINVSPTATIMREEVFGPVASFAKFKTEEEVISLANDNEYGLAAAVFTNDISRAVRVSDQIEVGIVFVNTWGSISANSPFGGIKQSGFGRENGTDALNDWTQVKCVKINVFNL

SEQ ID NO: 12397 - protein, 178 aa, Zea mays
MASSMISSPAVTTVNRAGAGMVAPFTGLKSMAGFPTRKTNNDITSIASNGGRVQCMQVWPPIGKKKFETLSYLPDLDDAQLAKEVEYLLRKGWIPCLEFELEHGFVYREHNRSPGYYDGRYWTMWKLPMFGCTDASQVLKELQEAKTAYPNGFIRIIGFDNVRQVQCISFIAYKPPGF

SEQ ID NO: 12398 - protein, 76 aa, Triticum aestivum
MGLCSCCCRCLEIMCAILLPPLGVCLRHGCCSMEFWISVLLTILGYLPGVLYAAYVICSVDPDRVRRHDDDYIYVA

SEQ ID NO: 12399 - protein, 340 aa, Burkholderia fungorum LB400
MTLGDTIKGMVGMDPTGHADPDMKAVLDALRSLDPKPIEDCTVAEARQQPTPADAVRKLMSDPAFSARPSLELEAVRTEDIMIPGATGSNPARVYTPQGEGPFPLILYFHGGGWVLADLDTYDATPRSIAAQSRAIVVSAHYRQAPEHRLPAAHEDAFAAWRWVVEQAPKLCGDAGKIAVMGESAGANLAINVAIHARDTGVRMPMHQALIYPVASNNIVSISYEENRNARPLNKPMMLWFLHNVINSESDLTSSLIDVVSADLSRLPPAVVVTAGIDPLRSDGEKLAQKLHSAGVPVEHRNYRGATHEFFGMAAVVQAARDAQAFVSLAQRQAFGGAPL

SEQ ID NO: 12400 - protein, 343 aa, Mycobacterium tuberculosis H37Rv
MRIGVLTGGGDCPGLNAVIRAVVRTCHARYGSSVVGFQNGFRGLLENRRVQLHNDDRNDRLLAKGGTMLGTARVHPDKLRAGLPQIMQTLDDNGIDVLIPIGGEGTLTAASWLSEENVPVVGVPKTIDNDIDCTDVTFGHDTALTVATEAIDRLHSTAESHERVMLVEVMGRHAGWIALNAGLASGAHMTLIPEQPFDIEEVCRLVKGRFQRGDSHFICVVAEGAKPAPGTIMLREGGLDEFGHERFTGVAAQLAVEVEKRINKDVRVTVLGHIQRGGTPTAYDRVLATRFGVNAADAAHAGEYGQMVTLRGQDIGRVPLADAVRKLKLVPQSRYDDAAAFFG

SEQ ID NO: 12401 - protein, 664 aa, Zea mays
MSPSNPLPPPGETRVGCSLPSPVTPQAMGGGPARHVAMRALRARFLSRQREGGPAAASTWWWCASGSAKGDMESTLKGIRGSDAPCVLDLDDAATVAGGVEDTYGEDRATEEQLVTPWTVSVASGYNLLRDPRYNKGLAFTERERETHYLRGLLPPAIVSQELQERKIMNNIRQYQLPLQRYMALMDLQEGNERLFYKLLIDNVEELLPIVYTPTVGEACQKYGSIFSRPQGLYISLKEKGKILEVLKNWPERSIQVIVVTDGERILGLGDLGCQGMGIPVGKLSLYTALGGVRPSACLPITLDVGTNNEELLNDEFYIGLRQRRATGQEYTDFLQEFMTAVKQNYGEKVLIQFEDFANHNAFDLLARYGTTHLVFNDDIQGTASVVLAGLIAAQTLLGGSLADHTYLFLGAGEAGTGIAELIALEISRQTKAPIEECRKKIWLVDSKGLIVSTRKESLQHFKKPWAHEHKPLSNLLDAVNAIKPTVLIGTSGKGQTFTKDVVEAISSFNERPIILALSNPTSQSECTAEQAYTWSKGQAVFATGSPFDPVEYNGKIHVPGQANNAYIFPGFGLGVVMSGAIRVHDDMLLAASEALAQQVTEENFEKGLIYPPFSNIRKISAHIAASVAAKAYELGLASRRPRPKDLVKYAESCMYSPIYRNYR

SEQ ID NO: 12402 - protein, 145 aa, Vibrio vulnificus YJ016
MLRILNRTLLSTWLVLFVAFVSFSSQAQNENTSSNHVDLFQFHNVELQERAIRLSKELRCPQCQNQNLLESNAQVARDLRFIVYSQINDGKSDQEVVDFMTSRYGNMVLYNPPINSSTLLLWIFPVVILIIFFVISIRNIHTKRM

SEQ ID NO: 12403 - protein, 413 aa, Rickettsia sp. BJ-90
IAELKIRGKIFKLPILKASIGEDVIDISRVSAEADCFTYDPGFMSTASCQSTITYIDGDKGILRHRGYDIKDLAEKSDFLEVAYLLIYGELPSGEQYNNFTKQVAHHSLVNERLHYLFQTFCSSSHPMAIMLAAVGSLSAFYPDLLNFKEADYELTAIRMIAKIPTIAAMSYKYSIGQPFIYPDNSLDFTENFLHMMFATPCTKYTVNPIIKNALNKIFILHADHEQNASTSTVRIAGSSGANPFACISTGIASLWGPAHGGANEAVINMLKEIGSSEYIPKYIAKAKDKNDPFRLMGFGHRVYKNYDPRAAVLKETCKEVLKELGQLDNNPLLQIAIELEAIALKDEYFIERKLYPNVDFYSGIIYKAMGIPSQMFTVLFAIARTVGWMAQWKEMHEDPEQKISRPRQLYTG

SEQ ID NO: 12404 - protein, 414 aa, Shewanella oneidensis MR-1
MSDIRQQALDYHEFPVPGKTAVCLTKPAETSHDLALAYSPGVAEPVREIAANPENAYRYTNKGNTVAVISNGTAILGLGNLGPLASKPVMEGKALLFKHFANIDSTDIEVTHNTAQEFINTVAAIAGTFGGINLEDIKAPECFVIERELIARCNVPVFHDDQHGTAIVTAAGMINALEIQGKLISDAIFVCMGAGAAAIACMTMLVKCGANRANIYMLDTKGVIHSGRTDLNEYKALFANETDKRTLQDVIKGADVFLGLSGPNVIGAEEVAMMADKPVIFACSNPDPEIKPELAHATRSDLIMGTGRSDYPNQVNNVLCFPFIFRGALDVRASCINDEMKIAAVHAIAELAKEAVPASVLKAYPKVSSLSFGSEYVLPKPMDPRLLPRVARAVAKAAIDSGVATITTLPKYAD

SEQ ID NO: 12405 - protein, 75 aa, Glycine max
SGPICYQRNRAGAGMVAPFTVLKSMAGFPTRNTNNDITSIASIVGRVQCMHVCPPIVKKKFETLSYLSDLDYAQL

SEQ ID NO: 12406 - protein, 388 aa, Salmonella bongori
QNGKLNVPENPIIPFIEGDGIGVDVTPAMLKVVDAAVEKAYKGERKISWMEIYTGEKSTQVYGQDVWLPAETLDLIREYRVAIKGPLTTPVGGGIRSLNVALRQELDLYVCLRPVRYYQGTPSPVKHPELTDMVIFRENSEDIYAGIEWKADSADAEKVIKFLREEMGVKKIRFPEHCGIGIKPCSEEGTKRLVRAAIEYAITNDRDSVTLVHKGNIMKFTEGAFKDWGYQLARDEFGGELIDGGPWMKIKNPNTGKEIVVKDVIADAFLQQILLRPAEYDVIACMNLNGDYISDALAAQVGGIGIAPGANIGDECALFEATHGTAPKYAGQDKVNPGSIILSAEMMLRHMQWFEAADLIVKGMEGAIAAKTVTYDFERLMEGAKLLK

SEQ ID NO: 12407 - protein, 483 aa, Rickettsia rickettsii
MAEFTPITIAYGDGIGPEIMEAVLYILRKAEARIRLETIEVGEKLYKKHYTSGISEESWESIQRTGIILKAPITTPQGGGYKSLNVTIRKTLQLFANIRPAVSFHPFTRTLHPNLNLTIIRENEEDLYAGIEYRQTHNMYESMKLISHTGCEKIIRYAFEYAVKNNRKKVMCLSKDNIMKFSDGVLHKVFNEIAKEYPQINNAHYIIDIGTARLATKPEIFDVIVTSNLYGDIISDVAAEISGSVGLAGSANIGQHYAMFEAVHGSAPDIAGKDIANPSGLLNAAIMMLVHIGQGDIATLIENAWKKTIEDGVHTADIYNEQSSSKKVGTKEFAEEVTKRLGQLPTKLPKADYPLIAEKQESNIDYKIDTKEVKKLVGTDIFVNMNVSSAHDIADKINKLDLGNFELKTISSKGLKLWPRDTRFETVSDHWCCRFMNKDGTEIKHLDITRLLEALSTANIDFIKVENLFEFDGVAGYSLAQGE

SEQ ID NO: 12408 - protein, 388 aa, Citrobacter koseri
QNGKLNVPENPIIPFIEGDGIGVDVTPAMLKVVDAAVEKAYKGERKISWMEIYTGEKSTQVYGQDVWLPAETLDLIRDYRVAIKGPLTTPVGGGIRSLNVALRQELDLYVCLRPVRYYQGTPSPVKHPELTDMVIFRENAEDIYAGIEWKADSADAEKVIKFLREEMGVKKIRFPEHCGIGIKPCSEEGTKRLVRAAIEYAIANDRDSVTLVHKGNIMKFTEGAFKDWGYQLARDEFGGELIDGGPWVKIKNPNTGKEIVIKDVIADAFLQQILLRPAEYDVIACMNLNGDYISDALAAQVGGIGIAPGANIGDECALFEATHGTAPKYAGQDKVNPGSIILSAEMMLRHMQWFEAADLIVKGMEGAIAAKTVTYDFERLMEGAKLLK

SEQ ID NO: 12409 - protein, 92 aa, Glycine max
ATFTGLKSMAGLPIRKTNRVISCTASNGGRMQCMQVMSPLGTKKFETLSYMTDLDDAQSAKEVEYLFTKGWINCLEIQLEHRVLYLEHNMSP

SEQ ID NO: 12410 - protein, 476 aa, Bordetella pertussis Tohama I
MHANFIDGAWLDGVDARPNINPSNLADVVGDYAQADAAQAGMAIAAASAAAHAWARSTGQRRADVLDAVGTELLARKEELGRLLSREEGKTLPEGVSEVTRAGHIFKFFAGEALRIQGEKLPMTRPGIEVDVTREPVGVVGIIAPWNFPIAIPAWKIAPALAYGNTVVFKPADLVPGSAWALAEILSRAGLPAGVFNLVMGRGSVVGQAILDDRRVNAISFTGSVATGRRVAEAAIGRMAKVQLEMGGKNPLVVLNDADLKVAVDCAVNGAFFSTGQRCTASSRLIVQKGIYPRFVEAVRERLQGLKVDDALAPGTDIGPVVDRSQFDQNLAYIAIGREEGAQLAWGGEPLKRANEGYYLAPALFVDCDNSLRIAREEIFGPVAAVIPVDSYEQALEVANDTEFGLSSGIVTTSLRHATHFKRESQAGMVMVNCPTAGVDYHVPFGGRKGSSYGPREQGRHAAEFYTSVKTAYTAA

SEQ ID NO: 12411 - protein, 395 aa, Aspergillus nidulans FGSC A4
MSGQQDNAPPSSATNAVLVASEPVPEGTHKVSGVDFEKYQGRDITVAEMVDNMKHMGFQSSAVADAARIINEMCSFPQRAYRHPETGDKTTIFLGYTSNLISSGLRDTIRYLVRHRHVSAIVTTAGGVEEDLIKCLAPTYMGSFTAPGAGLRAKGLNRIGNLIVPNSNYCSFEDWLVPILDKMLEEQEAANKKARETGNEEDELHWTPSRIIERLGREINHEDSVLYWAAKNNIPIFCPALTDGSLGDMLYFHTFRASPLRLRVDIVDDLRRINTMAVRAARAGMIILGGGIVKHHIANACLMRNGAEHAVYINTAQEFDGSDAGARPDEAPPLHEQDNKVPLKRNPTIDNDNAQQIDSTQSAEHPRHTFGIRSPGSERTSRKAGVGTAREQNQR

SEQ ID NO: 12412 - protein, 664 aa, Zea mays
  misc_feature (632)..(632): Xaa can be any naturally occurring amino acid
MISARTAAASPASLWKQGGRSEGGGSCDGCRTYRNTLRRAAAAKVRALPSRAVEAVKMGSAAEMEQEEAEVAAAAAGVVVEDHYGEDSATEELPILPWAFSVARYVSFSWLKKYAEESYFYISGYTLLRDPHHNKGLAFMEKERDAHHLRGLLPPAVVPQELQIKKIMHNLRQYQVPLQRYMAMMDLQERNERLFYKLLIDNVEELLPVVYTPTVGEACQKYGSIFRQPQGLYVSLRDKGKVLEVLRNWPHRNIQVICVTDGEAILGLGDLGSQGMGIPVGKLALYTALGGVRPSACLPITIDVGTNNEKLLNDEFYIGLRQKRATGEEYHELMEEFMAAVKQIYGEKVLIQFEDFANHNAFNLLAKYSKSHLVFNDDIQGTASVVLAGLLAALKVVGRTLAEHTYLFLGAGEAGTGIAELIALEISKQTSAPIEECRKKIWLVDSKGLIVDSRKNSVQSFKKPWAHEHEPLTTLYDAVQSIKPTVLIGTSGVGRTFTKEVVEAMASFNERPIIFSLSNPTSHSECTAEEAYNWTQGRAIFASGSPFDPVEYDGKVFVPGQSNNAYIFPGFGLGLVISGAIRVHEDMLLAASEALAAQATQENFDKGSIFPPFTNIRKISARIAAAVAAKAXYELGLATRLPPPRDLVKYAQSCMYTPVYRNYR

SEQ ID NO: 12413 - protein, 304 aa, Brassica napus
  misc_feature (194)..(194): Xaa can be any naturally occurring amino acid
MVFVKPQKKQAYFKRYQVKFRRRRDGKTDYRARIRLINQDKNKYNTPKYRYVVRFTNKDIIAQIVSATITGDIVLASAYAHELPRYGLKAGLTNYAAAYCTGLLLARRVLQMLEMDAEYEGNAEATGEDYSVEPTDTRRPFRALLDVGLVMTTTGNRVFGALKGALDGGLDIPHSDKRFAGFNKEGKNLDAEIXHRKYIYGGHVADYMKLLMEDEPEKYQSHFSNYLKKDLAPENMEEMYKNVHAAIRADPSIKKSDKEAPKEHKRYNPKKLTYDERKASLIQRVKALNSAIGGDDNDEDEDDE

SEQ ID NO: 12414 - protein, 112 aa, Bartonella sp. Ac1825yn
NEACLKMLQEIGSIKRIPEFIARAKDKNDPFRLMGFGHRVYKNYDPRAKIMQKTCHEVLKELNIKNDPLLDIAMELEKIALNDKYFIEKKLYPNVDFYSGITLKALGFPTEM

SEQ ID NO: 12415 - protein, 453 aa, Methanopyrus kandleri AV19
MEPLTVEVFAVGGYGEAGGRNMTAVRVDEEIVIFDCGMSLDKSLVFEKDFQKASARELRRVKAIPNDPILRPHRSKTVAAVLSHAHLDHIGAVPKLLFKYKCPVFGTEFTIELVKADLRNEIRYADEAEDIMINLYTVEPGDEVQISSKLRLEFIPISHSIPCCVLPVLHTPYGAIVYACDFKFDDNQIIGYKPDYKRLKQLGKEGVLLLITESLRVAEEIKTPSESVAREMVNDVLRFADEESEGIIVTTFSSHIERIQAIADTADRLGRKVILAGRSMGKYGRIAEELGLLNLPAGARIYDRPETIRRGLERANKEKEDYLLIVTGHQGEPGAVLPRIVDGELPYRLTEEDSVVFSSSTIPSPINRANRYVLDTKLRLKGVKMFKDVHVSGHAGREDHRLMLRMLQPEFIVPAHGDPDMLAAYAELATQEGYEVNRDVFIMFDGTKLSLPL

SEQ ID NO: 12416 - protein, 329 aa, Emericella nidulans
MDNNMEIDAARSPEPHHLSPTTDPGSIPTLDGWIESLMTCKQLAEEDVRRLCDRAREVLQEESNVQPVKCPVTVCGDIHGQFHDLMELFRIGGPNPDTNYLFMGDYVDRGYYSVETVTLLVCLKIRYPQRITTLRGNHESRQITQVYGFYDECLRKYGNANVWKYFTDLFDYLPLTALIENQIFCLHGGLSPSIDTLDNIRSLDRIQEVPHEGPMCDLLWSDPDDRCGWGISPRGAGYTFGQDISEAFNHNNGLTLVARAHQLVMEGYNWSQDRNVVTIFSAPNYCYRCGNQAAIMEIDEHLKYTFLQFDPCPRAGEPMVSRRTPDYFL

SEQ ID NO: 12417 - protein, 112 aa, Bartonella sp. Ap1707yn
NEACLKMLQEIGSIKRIPEFIARAKDKNDPFRLMGFGHRVYKNYDPRAKIMQKTCHEVLKELNIQDDPLLDIAIELERIALSDEYFIEKKLYPNVDFYSGITLKALGFPTEM

SEQ ID NO: 12418 - protein, 112 aa, Bartonella sp. Ac1723yn
NEACLKMLQEIDSVKRIPKFIARAKDKNDPFRLMGFGHRVYKNYDPRAKIMQQTCHEVLKELNIQDDPLLDIAIELEKIALNDEYFVEKKLYPNVDFYSGITLKALGFPTEM

SEQ ID NO: 12419 - protein, 335 aa, Methanopyrus kandleri AV19
MAYKIAVIPGDGIGPEVIEAALHVIEPLIDAEFVEGEAGDECAEKHGDPLPEDTLELCHEADAILFGAAGETAADVIVRLRQELDLYANIRPVRGFPGLRELTGEPYVRDDVDFVIVRENTEGLYSGIEGRFRDTAYTLRIITEEGTRRIAEVACDLAEERGSNTVTCVHKANVMRETCGLFREVCKEVVESRGLEFEEYYVDAAAMFMITEPERFDVVVTPNMFGDILSDEAAALVGGLGLAPSGNVGDRHGLFEPVHGSAPDIAGKGIANPFATILSAVMMLEWLGEDEAAEAVREAVGEAIREGVVTPDLGGDKKTMEVAEFVREAALNRVQ

SEQ ID NO: 12420 - protein, 1165 aa, Gibberella zeae PH-1
MDLRNILDATDFYSNFTAALSTFSLDHLDSPTLNLQIIIQEGNSADGDRSGSLETNEEPILQSGHLLLSHKIPLRIGNGSCSIEPASPSLVSREPSPELRIPTNQRQVEIQRRTQSHKSHKRQGGLRLAAVNGDVPVEGDVDNANPRQMQVGQENFPKRVKVKHDGVFHPKESSLGKFVAGVWEQIHSGVILEPHVLTEQVQLTSRSSGNSPSGDLVSTAPSIRPDQTWESFNRSNIFCQRVTQASRTCRSIEVIVQARWVELFDSYVEYLASTNPNLSMTKCRMRAIAEACTDFGWTEKELRNKMGIWRGYKEIKDVLGWVALVFSGMGLYRLCKYRVDFDKDKFSRARTLGKRMEVAADTLHTNWRQLLAIVGESTEPRFAGHPHDWVVQQDGSDPVPLRSTYLAYDSNFTFEHLEESIIDTALWGADDPRWTPPSSAICLSGINVCDLCSEVQSNESAVNACKCFPNLFGVPRLPIAVQVFCTSNGRNNGLQALVAFERGTAIGEFVGLITKDIEEQDVMDSQAGGTRYQIWQGKQGNFTRFANHSCKPNAQFEKFVWLGTQHIVMNNTADIPLLFRFNMINRKIPLASYLFTRLKQAGTRRIYGVPGDFTLRALDHVPRSGIQFVGCCNELNAGYAADGYARAQRHRLQSGLGALITTYGVGELSAANAVAGSYAEHLPVVHIVGTPSQKARQVSTTSVGGRSPHLHIHHTLADSRIGVFREIAEKFTVAQLDLSGVDAEDVPTKVDEVLAKALYHSRPVYVELPSDAVETVVSSTLLERPIEERHTINDESSHLETREMADSLLQRLYAAKRPLILVDRGDGIETIRPDINEFVQKSGIPTLSLPSGASMVNNSLPNYFGVYSGSIGIVDLTSAVKSADLVLAFGCQFSDTQTLGWGVVPERNSMIMIGRNNIEDHQTGTGEILRMVTANLDKRSLAEQDTSSWGNFRHLPSQTVEPASPINQDEFYIHLNKYLKDDDNILLGNATPIIGGRDFVLPPSSQLIASGMWFSIGHMLPAAMGVSQAKADQGSSGRTILLDGDGSFQMTAQELSTIIHKRVNMVVFIINNSGYTYERYIHGMDEEYNDVAPWNYSLGPNLFGQAPDGYPIQSCRVHTWKELDSVLNSEGFSTGKGLTLVDIVIDKYDISERAKALFELVNKQL

SEQ ID NO: 12421 - protein, 386 aa, Vitis vinifera
MESTLAFNSGSNSMNQSFSSSAEFNSPVPETIPKSEEDTFVFATLLTSASVLPMALKSALELDLLEIIAKAGPGAFVSTSEIAAKITKRNPKAPVMLDRILRLLATYDVVKCSLRDSPDGGVERLYGLGPVCKYFTTNEDGVSVAPLLLMNQDKVPMQSKRYHLKDAVLDGGIPFNKAYGMTDFEYHGTEPRFNKVFNNGVSGHPTITMKKILEAYKGFEGLTSIVDVGGGTGATLNMIISKYPTIKGINFDLPHVIDDAPSYPGVEHVGGDMFVSVPKGDAIFMKWMCYEWDDAHCLKFLENCYQALPDNGKVIVAECILPVVPDTSLATKSAVHIDVIMLAYNTGGKARTEKEFEALAKGAGFQGFKVVCCAFNSWIMEFCKTA

SEQ ID NO: 12422 - protein, 292 aa, Lolium multiflorum
IELGLLEILVAAGGKSLTPTEVAAKLPSAANPEAPDMVDRMLRLLASYNVVSCLVEEGKDGRLSRSYGAAPVCKFLTPNEDGVSMAALALMNQDKVLMESWYYLKDAVLDGGIPFNKAYGMSAFEYHGTDPRFNRVFNEGMKNHSIIITKKLLELYHGFQGLGTLVDVGGGVGATVAAITAHYPAIKGVNFDLPHVISEAPPFPGVTHVGGDMFKEVLSGDAILMKWILHDWSDQHCATLLKNCYDALPAHGKVVLVECILPVNPEAKPSSQGVFHVDMIMLAHNPGGSQRY

SEQ ID NO: 12423 - protein, 292 aa, Schedonorus arundinaceus
IELGLLEILVAAGGKSLTPTEVAAKLPSAANPEAPDMVDRILRLLASYDVVTCLVEEGKDGRLSRSYGAAPVCKFLTPNEDGVSMAALALMNQDKVLMESWYYLKDAVLDGGIPFNKAYGMSAFEYHGTDPRFNRVFNEGMKNHSIIITKKLLELYHGFEGLGSLVDVGGGVGATVAAIAAHYPTIKGVNFDLPHVISEAPQFPGVTHVGGDMFKEVPSGDAILMKWILHDWSDQHCATLLKNCYDALPAHGKVVLVKCILPVNPEANPSSQGVFHVDMIMLAHNPGGNQRY

SEQ ID NO: 12424 - protein, 173 aa, Glycine max
  misc_feature (147)..(147): Xaa can be any naturally occurring amino acid
  misc_feature (149)..(149): Xaa can be any naturally occurring amino acid
  misc_feature (162)..(162): Xaa can be any naturally occurring amino acid
MCGILAVLGCSDSSQAKRVRVLELSRRLKHRGPDWSGLHQYGDNYLAHQRLAIVDPASGDQPLFNEDKTVVVTVNGEIYNHEELRKQLPNHTFRTGSDCDVIAHLYEEHGENFMDMLDGIFSFVLLDTRDNSFIVARDAIGVTSLYXGXWGLECSVVNSSEXKRFDDDCDTLE

SEQ ID NO: 12425 - protein, 514 aa, Glycine max
  misc_feature (398)..(398): Xaa can be any naturally occurring amino acid
MSKTTTSSEQTARNRLATLAAHLLPSDATSAAAILHPHRLSAPTGDLPPANLKGTLTVVDERTGKKYQIEVTPDGTVRASDFKKISSGKNDKGLKLYDPGYLNTAPVISRISYIDGDAGILRYRGYPIEDLAEKSTFTEVSYLIMYGNLPSESQLAEWEFAISQHSAVPQGVLDMIQSMPHDAHPMGVLVNAMSALSVFHPDANPALRGLDIYDSKQIRDKQITRVIGKITTIAAAVYLRMAGRPPVLPSNHLSYTENFLYMLDSFGNRSYKPNPRLTRALDIIFILHAEHEMNCSTSAVRHLASSGVDVYTAIAGAVGALYGPLHGGANEAVLKMLSEIGTVQNIPEFIEGVKARKRKLSGFGHRVYKNYDPRAKVLRKLAEEVFSIVGRDPLIEVXAVALEKIALSDEYFIKRKLYPNVDFYSGLIYRAMGFQPEFFTVLFAIPRMAGYLAHWRESLDDPDTKIMRPQQVYVGEWLRHYAPINQRTASSNTDKLGQLAVSNASKRRLAGSGA

SEQ ID NO: 12426 - protein, 448 aa, Bacillus subtilis subsp. subtilis str. 168
MTHDLIEKSKKHLWLPFTQMKDYDENPLIIESGTGIKVKDINGKEYYDGFSSVWLNVHGHRKKELDDAIKKQLGKIAHSTLLGMTNVPATQLAETLIDISPKKLTRVFYSDSGAEAMEIALKMAFQYWKNIGKPEKQKFIAMKNGYHGDTIGAVSVGSIELFHHVYGPLMFESYKAPIPYVYRSESGDPDECRDQCLRELAQLLEEHHEEIAALSIESMVQGASGMIVMPEGYLAGVRELCTTYDVLMIVDEVATGFGRTGKMFACEHENVQPDLMAAGKGITGGYLPIAVTFATEDIYKAFYDDYENLKTFFHGHSYTGNQLGCAVALENLALFESENIVEQVAEKSKKLHFLLQDLHALPHVGDIRQLGFMCGAELVRSKETKEPYPADRRIGYKVSLKMRELGMLTRPLGDVIAFLPPLASTAEELSEMVAIMKQAIHEVTSLED

SEQ ID NO: 12427 - protein, 196 aa, Glycine max
MAFAGTTQKCMACDKTVYLVDKLTADNRVYHKACFRCHHCKGTLKLSNYNSFEGVLYCRPHFDQLFKRTGSLDKSFEGTPKIAKPEKTGEEKPAATKVSSMFGGTRDKCAGCQKTVYPTEKVTVNGTPYHKSCFKCTHGGCVISPSNYIAHEGKLYCKHHHVQLIKEKGNLSQLEGDHEKSAEQEKINGEVVAAET

SEQ ID NO: 12428 - protein, 301 aa, Zea mays
LLASFPPLYPSNGWHVSATPLGVCFRSTRPTFYRIYKSKSTEGFQSVPYVVALFSAMLWIFYALIKSNETFLITINAAGCVIETIYVVMYFVYAPKKAKLFTAKIMVLLNGGVFGVILLLTLLLFKGSKRVVLLGWICVGFSVSVFVAPLSIMRRVIQTKSVEYMPFSLSLSLTLSAVVWFLYGLLIKDKYVALPNILGFTFGVVQMVLYVLYMNKTPVAATAEGKDAGKLSSAADEHVLVNIAKLSPALPERSSGVHPVTQMAGVPVRSCAAEATAPAMLPNRDVVDVFVSRHSPAVHVA

SEQ ID NO: 12429 - protein, 191 aa, Yarrowia lipolytica
MQTIKCVVVGDGAVGKTCLLISYTTNKFPSEYVPTVFDNYAVTVMIGDEPYTLGLFDTAGQEDYDRLRPLCYPQTDVFLVCFSVTSPASFENVKEKWFPEVHHHCPGVPCLIVGTQVDPRSDRMILDKLSRHKLRPMTTEQGYQLARELGAVKYVECSALTQKGLKDVFDEAIVAALEPPVVKKNKKCIVL

SEQ ID NO: 12430 - protein, 112 aa, Bartonella sp. Ac1727yn
NEACLKMLQEIGSIKRIPEFIARAKDKNDPFRLMGFGHRVYKNYDPRAKIMQKTCHEVLKELNIKDDPLLDIAMELEKIALNDEYFIEKKLYPNVDFYSGITLKALGFPTEM

SEQ ID NO: 12431 - protein, 187 aa, Griffithsia japonica
HEARSLRYASSAIRATASPRSLSTSASTSPQFTVTLFPGHGVGPEISVAVQNIFNAADVPIVWDEHHIDVDNAKPGQDLISADALDSLRRNRFGLKGPMATPIGKGYRSLNLTLRKALGLYANVRPCVSIPGVQTPYDDVDVVTVRENTEGEYSGLEHVVYPGVVESLKVITPERVNARVQVPFSII

SEQ ID NO: 12432 - protein, 101 aa, Zea mays
  misc_feature (33)..(33): Xaa can be any naturally occurring amino acid
RRLSVRDLKEKFAKGLSGACKLAEDGTLEKTRXLYRQVLLKKLINGLNTLKGRVAGRNRYNAVEAILLREALTVQLTQQEGELMYEKAEVKKWVIFLKQAT

SEQ ID NO: 12433 - protein, 182 aa, Triticum aestivum
MSDAPASPPGGGGGGGGGGSDDGGGGGGFGGVREQDRFLPIANISRIMKKAIPANGKIAKDAKETVQECVSEFISFITSEASDPGRREKRKTINGDDLLWAMATLGFEEYIEPLKVYLQKHRETEGDSKLPGKSGDVSVKKDALGPHGGASGTSAQGMGQQVAYNPGMVYMQPQYHNGDISN

SEQ ID NO: 12434 - protein, 347 aa, Methanocaldococcus jannaschii DSM 2661
MMKVCVIEGDGIGKEVIPEAIKILNELGEFEIIKGEAGLECLKKYGNALPEDTIEKAKEADIILFGAITSPKPGEVQNYKSPIITLRKMFHLYANVRPINNFGIGQLIGKIADYEFLNAKNIDIVIIRENTEDLYVGRERLENDTAIAERVITRKGSERIIRFAFEYAIKNNRKKVSCIHKANVLRITDGLFLEVFNEIKKHYNIEADDYLVDSTAMNLIKHPEKFDVIVTTNMFGDILSDEASALIGGLGLAPSANIGDDKALFEPVHGSAPDIAGKGIANPMASILSIAMLFDYIGEKEKGDLIREAVKYCLINKKVTPDLGGDLKTKDVGDEILNYIRKKLKGY

SEQ ID NO: 12435 - protein, 112 aa, Bartonella sp. Ap1699yn
NEACLKMLQEIGSVERIPEFIARAKDKNDPFRLMGFGHRVYKNYDPRAKIMQKTCHEVLKELNIQDDPLLDIAMELEKIALNDEYFVEKKLYPNVDFYSGITLKALGFPTEM

SEQ ID NO: 12436 - protein, 371 aa, Magnaporthe grisea 70-15
MAHLPNPSLQVTADHQLKQVEASILSPGPGEVLLHVKCTGVCGSDVHFWKTGAIGTLVVEGDCILGHEAAGIVLSTGQDVTTLKPGDRVAIEPGVPCNKCFLCSEGRYNLCQEVQFAGVWPYHGTLQRYKVHPARWLHKLPDSLSYAEGALLEPLSVVLHGIRVAGLSLGRGAVICGAGPIGLIALAAARASGAHPIVITDVEPRRLEFAREFVPSCQTYRVDPTQSPEENARGIRALFGLKGGAVPDPDEYSAPPVVLECTGVESSVCTAAFTARRGGIVVVIGVGKSTMNNLPFMHLSLAEIDLRFINRYRDTWPAGIACLESGILPDLKKLVTHVFPLEKAIEGLTLASDPRNGSIKVQIVDEVDISP

SEQ ID NO: 12437 - protein, 112 aa, Bartonella sp. Ap1714yn
NEACLKMLQEIGSIKRIPEFIARAKDKNDPFRLMGFGHRVYKNYDPRAKIMQKTCHEVLKELNIQDDPLLDIAIELEKIALSDEYFIEKKLYPNVDFYSGITLKALGFPTEM

SEQ ID NO: 12438 - protein, 195 aa, Gibberella zeae PH-1
MAVVATIKCVVVGDGAVGKTCLLISYTTNKFPSEYVPTVFDNYAVTVMIGDEPYTLGLFDTAGQEDYDRLRPLSYPQTDVFLVCFSVTSPASFENVREKWFPEVRHHCPGVPCLIVGTQVDLRDDPSVREKLSKQKMQPVRREDGERMAKDLGAVKYVECSALTQYKLKDVFDEAIVAALEPPAPKKKSHKCLVL

SEQ ID NO: 12439 - protein, 457 aa, Mesorhizobium sp. BNC1
MTDRSNELNAWDRDHFFHPSTHMGTHARGESPNRVVAGGEGVYITDVNGRTSLDAFAGLYCVNVGYGRQKIADAIAEQARNLAYYHAYVGHGTDASIRLAKMIIDRAPQGMSRVYFGLSGSDANETNIKLIWYYNNVLGRPEKKKIISRWRGYHGSGIMTGSLTGLDLFHNAFDLPRAPILHTEAPYYFRRPDRSMSEEQFSQYCADKLEEMILAEGPDTVAAFIGEPILGTGGIVPPPAGYWEKIQAVLKKYDVLLIADEVVTGFGRLGTMFGSDHYGIKPDLITIAKGLTSAYAPLSGVIVSDKVWQVLVQGSDKLGALGHGWTYSAHPLCAAAGVANLELIDEMNLVENAGTVGAYFRAELANAVGSHPNVGEVRGDGMLAAVEFVADRDDRVFFDASKKIGPQIAAALAERGVIGRAMPQGDILGFAPPLCLTKEEADKVIAATASAVDSVLG

SEQ ID NO: 12440 - protein, 497 aa, Mesorhizobium sp. BNC1
MNAATAKIDLSAKLDLLHDKSLLRELAYVDGRWVTGHEPVNFEVRDPATGAVLAYVASLNAAQVDSAIDAAARAFLSWKRLLPQERAATLRAWYELIVAAKEDLALLMTLEQGKPLAESRGEIDYAASFVEWYAEEAKRLNVESVTSHLPGAEMMVRREPLGVVGVVTPWNFPSAMLTRKAAAALAAGCTIVAHPSSETPLSALALAELGERAGLPAGVLNVVTGDAATIVGRMCGDSRIRAMSFTGSTEIGRLIAAQCAPTMKRLVMELGGHAPLIVFEDAPLDKAVDIAIGAKFATSGQDCLAANRIYVQRGIYGAFCEAFAARIATLKVSDGLDETGDIGPLMHERAIAKVEEQVTDALGRGARCLIGGERHPAGRLFYQPTLLADVPDAALIMREETFGPVAAAVPFDTEDEVVRRANNTEYGLVAYVVTENGARQLRMGRALDYGMVAINRVKITGAPIPFGGVKQSGIGREGARHGLEAFTDLKYLCLDAA

SEQ ID NO: 12441 - protein, 452 aa, Glycine max
  misc_feature (42)..(42): Xaa can be any naturally occurring amino acid
  misc_feature (143)..(143): Xaa can be any naturally occurring amino acid
  misc_feature (169)..(169): Xaa can be any naturally occurring amino acid
VGEACQKYGSIFMHPQGLYISLKEKGKIREVLRNWPEKNIQXVIVVTDGERILGLGDLGCQGMGIPVGKLSLYTALGGVRPSACLPITIDVGTNNEKLLNDELYIGLKQRRATGQEYAELMHEFMTAVKQTYGAKGPDLDEEXLGNRNAFTRLKNYSSTHVCFKDDIQXGTASVVLAGLVASLKLVGGNLADHRFLFLGAGEAGTGIAELIALETSKQTNAPLEEVRKNIWLVDSKGLIVSSRKDSLQHFKKPWAHEHEPVKNLLDAVNKIKPTVLIGTSGQGRTFTKEVIEAMASINKRPIILSLSNPTSQSECTAEEAYKWSQGRAIFASGSPFPPVEYEGKVFVPGQANNAYIFPGFGLGLIMSGTIRVHDDLLLAASEALAAQVSQENFDKGLIYPPFTNIRKISAHIAANVAAKAYELGLATRLPQPKDLVKFAESCMYTPAYRSYR

SEQ ID NO: 12442 - protein, 226 aa, Methanocaldococcus jannaschii DSM 2661
MSNEDLKLKVAKEAVKLVKDGMVIGLGTGSTAALFIRELGNRIREEELTVFGIPTSFEAKMLAMQYEIPLVTLDEYDVDIAFDGADEVEETTLFLIKGGGGCHTQEKIVDYNANEFVVLVDESKLVKKLGEKFPIPVEVIPSAYRVVIRALSEMGGEAVIRLGDRKRGPVITDNGNMIIDVFMNIDDAIELEKEINNIPGVVENGIFTKVDKVLVGTKKGVKTLKK

SEQ ID NO: 12443 - protein, 540 aa, Glycine max
MATRRLSLLLSRSLSSTSFQAASLLHSLGRNSGKWGNFNRFSTAAAVEDLITPQVPITYTKHLINGQFVDAASGKTFPTYDPRTGEVIAQVAEGDAEDINRAVSAARKAFDEGPWPKLTAYERCKIILRFADLVEKHGDELAALETWNNGKPYEQSATAELPTFVRLFRYYAGWADKIHGLTVPADGNYHVETLHEPIGVAGQIIPWNFPLLMFAWKVGPALACGNTVILKTAEQTPLTALYVAKLFHEAGLPPGVLNVVSGYGPTAGAALASHMDVDKLAFTGSTETGKVVLGLAAQSNLKPVTLELGGKSPFIVCEDADVDQAVELAHFALFFNQGQCCCAGSRTFVHEHIYDEFLEKAKARALKRVVGDPFKKGVEQGPQIDVEQFQKVLRYIKSGIESKATLECGGDQIGSKGFFVQPTVFSNVQDDMLIAKDEIFGPVQTILKFKDIDEVIRRSNATHYGLAAGVFTKNVHTANTLMRALRVGTVWINCFDVFDAAIPFGGYKMSGIGREKGIYSLNNYLQVKAVVSPVKKPAWL

SEQ ID NO: 12444 - protein, 1566 aa, Ustilago maydis
MSAATPTSPGFPLTMGTGVMAAHFAAPSSNAGSPRSRPTTPLSAGLTPSGPTYDDLGRWDDADVASWLNAARLGHYASIFAEHDIRGSVILDVDQAALKEMGITMVKDRVRISAAIKLLNKRCADSAVARRPSVVSISPLLPLASHPLYAHEGEIEYLQHDHTADPSADGSGSNFGLNSMGMRRGQMRPPPLTLKQSTSRGMPGYASPAGSINQSQGFGLSAARGLTPGAARGSVWNTASSSSATSKPGTPDGALHRKVNSIGGVAAPLAVGASSSLSSSRHPYGHAVHSNRPSTATGASGYSNVPASQSLRSNHTSSSPTATSFGSNINAASARPSTATGAQSYTTNVPGTSSARDGYSPLTPISESNSLGNTPTTPSGIQQQQQSAGYAVGRGPFASSQRYAASSVPSQQQPSSGHTLRHVDSGEGYNLAGYQNPNPPTLEDLKRRTIKFISEEDNTTRIVNVSDCRDAYDVMARVLKKFGKPPSGNSYTPTADQGPTGDELGATETWGIFATSADGQNTKALSDNELLAICHAPQPHDPLRERGLTLRRIPNHLPGEDARKVPVRSGRNKLEAFFGERMPVAQMQPAGPGSGVNADEEDAGSVTISGKKMKRASTVSIMSGLGVGPFSSSSHNTGAGHTHGSTRAEGKLLSKKESKHMSPPPVTSKPSKIRNFFGQRPPSELINTNLADFFPSTDSKALQRTARRSIYGRASASTRSKRNSTWSFVADPDAPPLPNKGSMDGHPTPLERSSISIRERGTTPVIQIGYDSRSEDDHQSNARRTSSGTHSHLHPSLTGPPTLPPVVSRDSLDEWSRDLKAVGSPVTEENAMFQSSRHGHASGSQQHHAAMKHYPSHASGYADRPSISRRASGESARSRRSLASQVRHGLSAARERNADTASLLTVDEITQEVENRRESISLAGAGGGWVVDEDGVPIPIPGSSSPFSSSAAASTRPSSGISSSYVHNGHLEHDDSEGHSDEEANQSSDLEEATRTRKARGVPSKAASIRTVASKRASSVLQAPGDESDRHLGDPMAVARSTTSRASSVSELRRSVHDHGDPSDGESGSDFTDSDLDSDGSETDEDEQANDVYLPSAKPAPIKWHKGALIGAGSFGNVFLGMNAKTGLLMAVKQVELPSGDSHLDQRKKGMLEALEREIKLLKSLEHENIVQYLDSFADDSHLNIFLEYVPGGSIVALLRNYGAFEEPLVRNFVRQILNGLSFLHNRGIMHRDIKGANILVDNKGGIKISDFGISKKVESDLVLATNKGGAGGGGAGGAAHRPSLQGSVFWMAPEVVKQTSYTIKADIWSLGCLVVEMISGTHPWAELNQMQALFQIGMGRKPSLPDEISNECRDFLEKTFELDYNNRPSADELLNHAFMGTEMTFPPSSGADGSGGGDDDAGGSGDAGDGDASTMGMTNDAETGTTRETRETKDGKRPTRSKSTRRLEREKRHKEAAAAAAAATALDTGTPNTPTSHTAAAAAAAAAASASASASASPAVASTSPAPGDAETGSPTNGKSAVPPAGSTGGTPESILTVSIATARGNSTSTALSAADAAFSEEADS

SEQ ID NO: 12445 - protein, 462 aa, Arabidopsis thaliana
MWRRSNLPGNPDSDQSISEEEEENDISPKENAKEQERGLLLQTKLEKLIGCGELNYARETGDVTLEATLRKISSSLEDVVEVPDSPEESYISSSRRTGLACISAQENGSDDEITHDEQVATWSAISKETKSLIHLNGVASVASSHLSGFRAKKSSNGLKDHGRPKFSFNSHTHGETSSKISDMAEIFEPDVEDQAIEEDPIIECPNSFDERSENRQGVSVAESREVLHECTKDAVPKLQEIPLDKIRLIKRSSELDSRHEAKSRKFTHKGNSSNFQDSDTDDELPGPMDSGSSSDDEPSYQSSVPNISNQKKQFVGDRFDEAIKASSLSKEGLLFGSPKLSGGSSLYGKLQQIMKQEKETEMEIMRKLQSGIGEAVMSRHLEGKLVVCKCSVIDLSGDSLLLKNTQALAAKETETTIIFSPKVCADVDIEIGNFIRVYAPWKELEVQKTNDVIILSSYFSSL

SEQ ID NO: 12446 - protein, 129 aa, Chlamydomonas reinhardtii
MGGCLEEQYLEVLAALHSDAVAAATLCRVFSSRERTEEVAFGLNTVFMLFSAALVFIMHGGFAMLEAGAIRSKNAMNILLQTVLDGAASAVMWYLVGFGFAYGIGDNPNGFIGDALFGLSRYSSHNTGT

SEQ ID NO: 12447 - protein, 305 aa, Hordeum vulgare subsp. vulgare
MKILIILTILAMATTFATSEMQVNPSVQVQPTQQQPYPESQQPFISQSQQQFPQPQQPFPQQPQQPFPQSQQQCLQQPQHQFPQPTQQFPQRPLLPFTHPFLTFPDQLLPQPPHQSFPQPPQSYPQPPLQPFPQPPQQKYPEQPQQPFPWQQPTIQLYLQQQLNPCKEFLLQQCRPVSLLSYIWSKIVQQSSCRVMQQQCCLQLAQIPEQYKCTAIDSIVHAIFMQQGQRQGVQIVQQQPQPQQVGQCVLVQGQGVVQPQQLAQMEAIRTLVLQSVPSMCNFNVPPNCSTIKAPFVGVVTQVGGQ

SEQ ID NO: 12448 - protein, 132 aa, Zea mays
  misc_feature (109)..(109): Xaa can be any naturally occurring amino acid
MLTNPLPLAAVTVSRMMAPLKHVRGLEFAADVGYVDFLSRVNRVEEEARRNGSWDAPHPWLNLFVSARDIADFDRAVIKGMLADGIDGPMLVYPMLKSKWDPNTSVALXGEVFYLVALLRFCRSGGPAVDEL

SEQ ID NO: 12449 - protein, 134 aa, Brassica napus
  misc_feature (92)..(92): Xaa can be any naturally occurring amino acid
MGERVKGTVKWFNVTKGFGFISPDDGGEDLFVHQSSIKSDGYRSLNENDAVEFEIITGDDGRTKANDVTAPGGGALSGGSRPVEGGGDRGGXGGYGGGGGGYGGGGGGYGGGGGGYGGGGGGYGGGGYGGGGGG

SEQ ID NO: 12450 - protein, 194 aa, Xylella fastidiosa 9a5c
MNMLNVLRFPVLALALALAFVSSGVLADAGSLLDLDYRPLAGKETVNLQRLYGGKVLLVVNTASKCGFTPQYEGLEALHQKLSPLGFAVLGFPSNDFKGQEPGDEQQIQKFCTLTYGVKFPMFQKVHVKGDEVTPLYQRLTQTTGVAPGWNFHKYLIARDGHVVAQFDSRTRPDDPILLEAIKRELAKPVQVAH

SEQ ID NO: 12451 - protein, 322 aa, Xanthomonas campestris pv. campestris str. ATCC 33913
MEFDPDVVRLFVQLQQAGQPPMEALPLQEARAMMRGMGVQLGFPRLPMAQVTDLQADTAAGTVPLRLYRPPGLNDTPAPTCLFVHGGGGVVGDLDSHDDVCRQLAARTPCQVLAVDYRLAPKHPAPAGVEDVIATLHWLAEHADAVGADPQRLAICGDSIGGGMAAVAAITAQQRGIALRCQLLLYPLTDARPDTGVHPSRGRNAEIPPLTRSAVQFFNRLLLPDMRLADHWHISVLLAPDVAGVAPALVVLADRDILHDEGLQYAERLRTAGVEVTQRTCVGMIHGFITMGGVIRAAEETIELAALMLRQRLLPVQPRFAA

SEQ ID NO: 12452 - protein, 451 aa, Methanococcoides burtonii DSM 6242
MTSINPANGTVNGEFEFHSPDEVDLILKRSSESFQYWSSLKGVERAVYIENVAKVLRSDKQELAETITMEMGKPIRQALAEVEKCASMFDHFATNICSLLEPDVVKESPSAFISYEPMGAVLAIKPWNFPLWQVLSAASHILAGGNTMVLKHSGYVPMCALNIESVFEKAGFPEGVFQTVLVDGPTASSLISRPEIAAVSFTGGLSAGQNVAEVAGRNMKKCVLELGGSDPFIVLEDADIEKAAKAGVAGRFLNTGQTCISSKRFIIESSVVDEFTSAFVENTRKLKIGDPLDADTDLGPLVRDKQVSLLEHQIYNAISMGAKVELGGGKVEGDGYYFSPVVLSNVSLYMQVMKEETFGPVAPIISVETESEALDVANATEFGLGASIWSGDKDKASLLASQVQSGVVGVNGFFKPEADLPFGGVKKSGIGRELSRFGFYEFMNIRSTVLF

SEQ ID NO: 12453 - protein, 112 aa, Bartonella sp. Em1712yn
NEACLKMLQEIGSVERIPEFIARAKDKNDPFRLMGFGHRVYKNYDPRAKIMQKTCHEVLKELNIQDDPLLDIAIELEKIALNDEYFVEKKLYPNVDFYSGITLKALGFPTEM

SEQ ID NO: 12454 - protein, 166 aa, Zea mays
  misc_feature (51)..(51): Xaa can be any naturally occurring amino acid
  misc_feature (103)..(103): Xaa can be any naturally occurring amino acid
  misc_feature (145)..(145): Xaa can be any naturally occurring amino acid
GRVQEHQEMLHCPSKAMDIENEIQVLCDQLAKKSSDSLRLLKELELHRSYXENDMPLYELKGLETLGSTLHIVVHDCASVDFWNSSIQWFRIQPEGSKKEIIXGTTKPAYAPEPHDVGRYTQAEVKSGGQTSITKIAGSVDPVSXAAGLVHYVEALVRRRETGYNV

SEQ ID NO: 12455 - protein, 362 aa, Triticum aestivum
MGSTAVEKVAVATGDEEACMYAVKLAAASILPMTLKNAIELGMLEILVGAGGKMLSPSEVAAQLPSKANPEAPVMVDRMLRLLASNNVVSCEVEEGKDGLLARRYGPAPVCKWLTPNEDGASMAGLLLMTHDKVTMESWYYLKDVALEGGQPFHRAHGMTAYEYNSTDPRANCLFNEAMLNHSTIITKKLLEFYRGFDNVETLVDVAGGVGATAHAITSKYPHIKGVNFDLPHVISEAPPYPGVQHIAGDMFKKVPSGDAILLKWILHNWTDDYCMTLLRNCYDALPMNGKVVIVEGILPVKPDAMPSTQTMFQVDMMMLLHTAGGKERELSEFEELAKGAGFSTVKTSYIYSTAWVIEFVK

SEQ ID NO: 12456 - protein, 226 aa, Triticum aestivum
  misc_feature (121)..(121): Xaa can be any naturally occurring amino acid
MKTLLILTILAMATTIATANMQVDPSSRVQWPQEQPPPQSQQPFSQQPQQIFPQPQQTFPHQPQQAFLQPQQTFPRRPQQQFPQPQQPQQPFPQPQQPQLPFPQQPQQPFPQPQQPQQPFXQSQQPQQPQQPFPQPQQQFPQPQQPQQSFPQQQQQLPQPQQPQQSFPQQQRSFIQPSLQQQLNPCKNILLQQCKPASLVSSLWSIIWPQSDCQVMRQQCCQQLAQ

SEQ ID NO: 12457 - protein, 585 aa, Triticum aestivum
  misc_feature (497)..(497): Xaa can be any naturally occurring amino acid
YQTRRPSNRFPLFSCSARLQSTLLASHRPIRWTAPPARGRLAVLSSHLLAAGADPAAALGRSPASAAAPGARAGVLAVVDSRTGKRYEVKVSEDGTVRATDFKKITTGKDDKGLKTYDPGYLNTAPVRSSICYIDGDEGILRYRGYPIEEVAESSSFVEVAYLLMYGNLPTQSQLAGWEFAISQHSAVPQGLLDIIQSMPHDAHPMGVLASAMSTLSVFHPDANPALRGQDLYNSKQVRDKQIVRVLGKAPAIAAAAYLRLAGRPAVLPSNNLSYSENFLYMLDSLGNKEYKPNPRLARVLDILFILHAEHEMNCSTAAVRHLASSGVDVFTALSGAVGALYGPLHGGANEAVLKMLNEIGAVENIPDFIEGVKNRKRKMSGFGHRVYKNYDPRAKVIRKLAEEVFSIVGRDPLIEVAVALEKAALSDDYFIKRKLYPNVDFYSGLIYRAMGFPTEFFPVLFAIPRMAGWLAHWKESLDDPDNKIMRPQQVYTGVWXLRHYTPVRERVASNQGEELGQIAASNATRRRRAGFFPVEQQQARMHGAASSPRNKPGCCRCPSQRRSGSSPGAVILLVSPRHLAVAMQ

SEQ ID NO: 12458 - protein, 292 aa, Oryza sativa (japonica cultivar-group)
MEHLERRGLAQGAYDGADPLDIGGFGDATGVDDAAEDVGDDLPLLDEVPAQDDLLRVVLIVADRGGGGGGRGSGISRGVAIRRGRGGHRDGDARCRLLPPELISLLSRAPTTETSSPPSAAMQQRRPASGRPSGTDGSDFSYRMVVDSRYQRVADGKSRLGRLILVQALHQVAGGALLLLALSKGAEMNKFAVMSVAAGLLAIVLGEIGRRRTMAVLLRMYTSLSSIAVAFSVACIIRSELFFKITKQNTESITSHELLEVVRVALGVLLQLVVIATTTRLLQNMSPPRRAS

SEQ ID NO: 12459 - protein, 311 aa, Magnaporthe grisea 70-15
MNSAASSHQPDASGEAPKQLNYLPYLKLNDGNQIPMLSYGLGTAQCRRGGDVDPKLVELTKIALKKGYNHLDGAEVYGNEEELGQAVKESGLPRESLFITTKTFCKPGVTTQESLDASLKRLQLDYVDLFLIHSPFWAESPEELQAKWAEMEALREAGKAKSIGVSNFLQEHLETILKTAKVPPAINQIEYHPYLQHGDLLDYHRKQNIATSAYGPLTAITNAKGGPVDGKYHELARKYGVTPGEIALRWCIDQGVVAITTSAKEDRLEALQKRIPSFKLTPKEVQEISELGNQKHHRGFWNNKFAADDRR

SEQ ID NO: 12460 - protein, 111 aa, Triticum aestivum
MSLCTIARRLCLSKPSSGRCLSVVWGHLYSTEVASQKVVDLADRIAALPPEEIKQIAPALLFRLNREPPQVISGQGFSFGAQGGSGAAAGKADEKKAEKTVFDVKLEKFDA

SEQ ID NO: 12461 - protein, 142 aa, Glycine max
  misc_feature (119)..(120): Xaa can be any naturally occurring amino acid
AVVNRYLAESESARQWGSQLHTFCIGLKGSPDLKAAKEVADYLGTRHHELYFTVQEGIDALEEVIYHIETYDVTTIRASTAMFLMSRKIKALGVKMVRGGEGSDEIFGGYLYFHKAHNXXEFHEETCRKIKAHHLYDCLRAQ

SEQ ID NO: 12462 - protein, 210 aa, Arabidopsis thaliana
MLTAAGDDELDPVVGPESATEAATPRVLTIISHVMEKLVARNEWLAKQTKGFGKSLEAFHGVRAPSISIAKYLERIYKYTKCSPACFVVGYVYIDRLAHKHPGSLVVSLNVHRLLVTCVMIAAKILDDVHYNNEFYARVGGVSNADLNKMELELLFLLDFRVTVSFRVFESYCFHLEKEMQLNDAVSSLKDIQPMQESLSPASTLSSLYV

SEQ ID NO: 12463 - protein, 170 aa, Campylobacter jejuni
MKNNPYIIWLTGLAGSGKTTIGQALYEKLKLKYKNLIYLDGDELREILGHYAYDKQGRIDMALKRAKFAKFLNDQGMIVIVTTISMFNEIYDYNRKQLKNYYEIYIECDMHELMQRDQKGLYTKALNKEIDNVVGVDIEFDKPEADLVIDNSCRNNLEEKVELIIKKLGL

SEQ ID NO: 12464 - protein, 356 aa, Glycine max
MVNNMIVQIHHGRLSENDSRRYFQQLIDGVDYCHSKGVYHRDLKPENLLLDSLGNIKISDFGLSAFPEQGVSILRTTCGTPNYVAPEVLSHKGYNGAVADVWSCGVILYVLLAGYLPFDELDLTTLYSKIERAEFSCPPWFPVGAKMLIHRILDPNPETRITIEQIRNDEWFQRSYVPVSLLEYEDVNLDDVNAAFDDAEEPRADQQCDNDDMGPLMLNAFDLIILSQGLNLATIFDRGQDSVKYQTRFISQKPAKVVLSSMEVVAQSMGFKTHIRNYKMRVEGVSANKTSYFSVILEIFEVAPTFYMVDIQKAAGDTGEYLKFYKNFCSNLEDIIWKPPHEASKSRISKTKSKRR

SEQ ID NO: 12465 - protein, 495 aa, Burkholderia fungorum LB400
MTGHLPKLSMYIGGEWVEPASGEYFETVDPFTAKPWALIPRGNAEDADRAIRAADKAFRDGPWRAMHPSERGLVLQRFGQLIGQHADELAGIEVRDNGRLLAEMRHQIRGIPKWYYYYGGLADKIEGAVHPVEQPALSFTRHEPLGVCVGIVPWNAPLLLLSLKAAPALAAGNTIVLKPAEFTSASALKLMELVEQAGFPPGVVNVVTGFGKEVGEPLVAHPLTRHLGFTGSTATGSHLYALAAKDVKRASLELGGKSANLVFNDADLNNAVRGVVGGIFGAVGQTCIAGSRLLVQRRIHDEFVDKLAAFTKTARIGDPRKPETQIGPIANRMQYNKILGYIDIAREEGAELVMGGARPDIAECGEGFFIEPTIYTGIRNDMRIAREEVFGPVLATIPFDDPEEAIAIANDSDFGLGAGVWTSDMRLALRMSERLEAGSVWINTYRDISYTTPFGGYKKSGIGRENGIEGIREYLQTKAVWISTAEEIENPFVIG

SEQ ID NO: 12466 - protein, 117 aa, Beta vulgaris subsp. vulgaris
MASSAFVKFTCALVMCMMVAAPLAEAITCGLVASKLAPCIGYLQGAPGPSAACCGGIKSLNSAAASPADRKTACTCLKSAATSIKGINYGKAASLPRQCGVSVPYAISPNTNCNAIH

SEQ ID NO: 12467 - protein, 243 aa, Triticum aestivum
MATDRVKASVLHGEKDLRLEERELPKPSSNEVQVAVQSTGLCGSDLHYYNHFRNGDIIVREPLTLGHESAGTVVAVGSEVTHLKPGDHVALEVGLPCETCELCDEGRYNICRGMKFRSSAKANPHAQGTLQERINHPAKWCHKMPEHVTLDLGALVEPLSVAMHARDRASLPKGSTVLVLGAGAVGLLAAAVAKADQAKTVIIADILKDRLDFATSNGFADASVVGPMEPQLSRTAGFRSKVA

SEQ ID NO: 12468 - protein, 386 aa, Triticum aestivum
  misc_feature (66)..(66): Xaa can be any naturally occurring amino acid
MEGGGARNVSAAAAQTKESADDGSCKPLPPCCVKAQAAVAESEAKCHATVVSGWFTGTRSRSGQTXSKAQYFNNPMWPGEAHSLKVEKILYQGKSPYQEVLVFESSTYGNVLVLDGIVQLTDKDECAYQEMVTHLALCSIPSPKNVLVVGGGDGGVLREIAKHDSVESIDICEIDQLVIDVCKDFFPRLYVGYKDPRVKLHVGDAVEFLRNSPEGKYDAIIVDSSDPIGPAQELVEKPFFQTIARALKPGGVLSNLAESMWLHTHLIQDMLSICREVFKGGVHYAWASVPTYPSGVIGFLLCAKEGPPVDFLTPVNPIEKIEGATKDGREMRFYNSEIHRAAFILPTFVKRELEAYNSSTEKERPEKPTAKPVKMKVMRDSAITAS

SEQ ID NO: 12469 - protein, 564 aa, Zea mays
MAAAAVTSNGGAVAANGPAPGRLASVYSEVQTNRLLHTLPLPSVLRSNFSVVDGPASSAAGNPDEIAKLFPNLFGQPSASLVPSAEPAATRPLKVGVVLSGGQAPGGHNVICGIFDYLQERAKGSTLLGFKGGPAGIMKCKYVELTSDFVYPYRNQGGFDMICSGRDKIETPEQFKQAEDTANKLDLDGLVVIGGDDSNTNACLLGEYFRSRNLKTRVIGCPKTIDGDLKCKEVPTSFGFDTACKIYSEMIGNVMTDARSTGKYYHFVRLMGRAASHITLECALQTHPNAALIGEEVAAKKETLKNVTNYITDIICKRADLGYNYGVILIPEGLIDFIPEVQKLIAELNEILAHDVVDEAGAWKSKLQAESRELFEFLPKTIQEQLMLERDPHGNVQVAKIETEKMLISMVETELEKRKAEGRYSAHFRGQAHFFGYEGRCGLPTNFDSNYCYALGYGAGALLQSGKTGLISSVGNLAAPVEEWTVGGTALTSLMDVERRHGKFKPVIKKAMVELDAAPFKKYASLRDEWAIKNRYISPGPIQFSGPGSDDSNHTLMLELGAEL

SEQ ID NO: 12470 - protein, 168 aa, Glycine max
  misc_feature (49)..(49): Xaa can be any naturally occurring amino acid
  misc_feature (145)..(145): Xaa can be any naturally occurring amino acid
MIYSPSVTTVNRAGADMGATFTDLNSMAGFPIIKTNNDITSIDTNNGRXQCIQVWPPIGNKKFETLSYLPYLDDAQLAKEVEYLLKKGWIPCLEFKSEHGFLCREHNKTPGYYYRRYCTMWKLPIEGCTDANNVVEEDKHDKTAXPNWLISIFRNDNEMQVHCISVNY

SEQ ID NO: 12471 - protein, 466 aa, Sinorhizobium fredii
MSKRFRSRSAARAARHRLRRGEQDMSNRLNTTPNDLSAFWMPFTANRQFKKEPRLFVGAKDMYYTTHDGRTVLDGTAGLWCVNAGHCRPKITEAIREQAGELDYAPAFQLGHPKAFELANRLVDIAPEGLNHVLYTNSGSESVDTALKVALAYHRAKGNGSRFRLIGRERGYHGVNFGGISVGGIVANRKMFGTLLTGVDHLPHTHLPAKNAFTRGEPKHGGDLASELERIVTLHDASTIAAVIVEPVAGSTGVLIPPKGYLQKLREICTKHGILLIFDEVITGYGRLGTPFAAQYFDVKPDIITTAKGLTNGVIPMGAVFVTSEIHDAFMTGPEHLIEFFHGYTYSGNPIASAAALGTLDTYKEEGLLTRAAELASYWEEALHSLKDCPHVIDIRNIGLIGAVELEPIAGEPTKRAFSAFLKAYEKGLLIRTTGDIIALSPPLIIEKHQIDELIDKLRDVLKNNI

SEQ ID NO: 12472 - protein, 195 aa, Zea mays
DVITGHGETMTCSKERNADLFDAVLGGLGQFGVITRARIVVEPAPARARWVRLVYTDFAAFAADQERLIAGPRQPDGTFGPMSYVEGSVFVNQSLATDLTNTGFFSDADVARIVALAAERNATTVYSIEATINYDNATSVDQELKSVLDTLSFVEGFAFQRDVSYEQFLDRVRNEEVALDKLGLWRVPHPWLNMF

SEQ ID NO: 12473 - protein, 502 aa, Arabidopsis thaliana
MAQVLSTPLAIPGPTPIQFMAGLLARIVTKNTNKETSTPESPRSPRTPQGSILMDKYEIGKLLGHGSFAKVYLARNIHSGEDVAIKVIDKEKIVKSGLAGHIKREISILRRVRHPYIVHLLEVMATKTKIYIVMEYVRGGELYNTVARGRLREGTARRYFQQLISSVAFCHSRGVYHRDLKLENLLLDDKGNVKVSDFGLSVVSEQLKQEGICQTFCGTPAYLAPEVLTRKGYEGAKADIWSCGVILFVLMAGYLPFDDKNILVMYTKIYKGQFKCPKWFSPELARLVTRMLDTNPDTRITIPEIMKHRWFKKGFKHVKFYIENDKLCREDDDNDDDDSSSLSSGRSSTASEGDAEFDIKRVDSMPRPASLNAFDILSFSDLSGLFEEGGQGARFVSAAPMTKIISKLEEIAKEVKFMVRKKDWSVRLEGCREGAKGPLTIRVEIFELTPSLVVVEVKKKGGNIEEYEEFCNKELRPQLEKLMHYQADEVEEVMCLPPEIEQ

SEQ ID NO: 12474 - protein, 312 aa, Methanothermobacter thermautotrophicus str. Delta H
MNKDALNALKFKYMKIRWSDMMNEGIINDILRVKNPRWRTSITRVEPNRIVTRGYSQEDLIGGVSFSEMVYLLIRGELPPQNVARMLEAVLVSFCDHGVTPPSTQAARMIASAGSPVHACIAGGLLAFGKNHAGAIERSMKLFQETVSSCESEDEIPDAALRLVDDHLQANRRIPGFGHRYHNADPRAVRLLELAEDYGCVGPHTSLALEVQEILLERKGVRMNVDGANAGILSDMGFDWRTGAGVFMIGRLPGLISHVYEEKVREPAFRKFFEIEEIQYDGEEKRILEADYRTLNGSEIWKTTNTKEPGRE

SEQ ID NO: 12475 - protein, 102 aa, Kluyveromyces lactis
GSRRASVGSMARPAFVNKLWSMVNDKSNEKFIHWSTSGESIVVPNRERFVQEVLPKYFKHSNFASFVRQLNMYGWHKVQDVKSGSMLSNNDSRWEFENERHA

SEQ ID NO: 12476 - protein, 467 aa, Listeria monocytogenes EGD-e
MTSVMWFRRDLRVNDNKALYHACKEDDLLLLFQVNPAQFITGSPSHQAFFASVAHFKQEVDKTALLQIMFGEPVECLKQLKETLPSWDKVYFNRDETGYGAERDEAAKTFFDEQEIEVQAFHDSYLHSAEEVKKSPTEYYKIFTPYYKKWREEIKETPFKVTLKADNIRKENLFPKYEEQFAEMTCDLPILDSGEKTANTRLANFIKHDVADYDKARDFPELDKTSHLSRYLRTGEISVRTIWQALQENEATEGRAIFEKELCWRDFYNMIYVSFPNQKNEPIQENYRFIEWENNREFFKAWQEGKTGFPLVDAAMRQLKETGWMHNRLRMVTASFLTKDLLIDWRFGEKYFQQMLIDYDPASNIGGWQWAASTGTDAVPYFRIFNPTTQSQKFDPTGKFIRKYVKELANLPDKFIHQPEKMSEIEQKEYGLLLGKDYPFPLIDHKERRKLAIARYEFSKEHYRGNI

SEQ ID NO: 12477 - protein, 107 aa, Triticum aestivum
MAGTAAIAPPPQPMAPPQPVEENATAAPSQPMAPLQPMAESATVVVVVPPPPPDGTTTFLCLILAFFIPPLGVFLKYKCEIEFWICLILTFLAYAPGIIYAVWVIVK

SEQ ID NO: 12478 - protein, 270 aa, Mycoplasma genitalium G-37
MDTYTSAKINWFPGHMKKIHDQLKKLSSQIDGIIEIVDARAPTLTHNSEIISYFLNKPKLILALKTDLAQYKPNKKILFGSLKEPFKLKKKVLKTLTTLFANKRQQLKAKGLLIKQFRLAVIGMPNVGKSSLINLLINKNHLKVANRAGITKSLNWIQISPELLLSDTPGVFLKRIDEIQIGYKLVLTNVIRREVVNIEEVGMFAFNYLKKHYKQLLPFEADSFINFLEKFAKVRGLIKKANELNTNLACEIFINELINGKYGKLSYELN

SEQ ID NO: 12479 - protein, 508 aa, Glycine max
  misc_feature (238)..(238): Xaa can be any naturally occurring amino acid
MASNDSDSQMKIVHGDAGYILEDVPHFADYIPNLPTYPNPLRSNPAYSVVKQYFVHMDDTVPQKVVVHKDSPRGVHFRRAGPRQKVYFKSDEVHACIVTCGGLCPGLNTVIREIVCGLSYMYGVNKVLGIDGGYRGFYSKNTITLTPKVVNDIHKRGGTILGTSRGGHDTGKIVDSIQDRGINQVYIIGGDGTQRGATVIYEEVRRRGLKVAIAGIPKTIDNDIPVIDKSFGFDTAVXEEAQRAINAAHVEAESIENGIGVVKLMGRYSGFIAMYATLASRDVDCCLIPESPFYLEGKGGLFEFIEKRLKENGHMVIVIAEGAGQDLLTESMQAMDQKDASGNKLLQDVGLWISHKIKDHFARKDKMPINLKYIDPTYMIRAIPSNASDNVYCTLLAQSAVHGAMAGYTGFTVGLVNGRQTYIPFIRINERQNKVVITDRMWARLLSSTNQPSFLSPKDLEEAKKAESPTQLLEENNCNDVGDAEKEQPPKDEQESGNHTDNGIKTQN

SEQ ID NO: 12480 - protein, 355 aa, Metarhizium anisopliae
MSRSNPPNAGGSRKISFNVSEQYDIQDVVGEGAYGVVCSAIHKPSGQKVAIKKITPFDHSMFCLRTLREMKLLRYFNHENIISILDIQKPRGYDTFNEVYLIQELMETDMHRVIRTQDLSDDHCQYFIYQTLRALKAMHSANVLHRDLKPSNLLLNANCDLKVCDFGLARSAASQEDNSGFMTEYVATRWYRAPEIMLTFKEYTKAIDVWSVGCILAEMLSGKPLFPGKDYHHQLTLILDVLGTPTMEDYYGIKSRRAREYIRSLPFKKKVPFRTLFPKTSDLALDLLEKLLAFNPVKRITVEEALKHPYLEPYHDPEDEPTAPPTPEEFFDFDKHKDTLSKEQLKQLIYQEIMR

SEQ ID NO: 12481 - protein, 154 aa, Glycine max
MSILPKGDSVQIREVWNDNLEEEFALIREIVDEYNYVAMDTEFPGVVLRPVGNFKNINDYNYQTLKDNVDMLKLIQLGLTFSDENGNLPTCGTESPCIWQFNFREFNVSEDIFASDSIELLRQCGIDFKKNSEDGIDVNRFRELLMCSGIVLND

SEQ ID NO: 12482 - protein, 453 aa, Corynebacterium glutamicum ATCC 13032
MSLTFPVINPSDGSTITELENHDSTQWMSALSDAVAAGPSWAAKTPRERSVVLTAIFEALTERAQELAEIIHLEAGKSVAEALGEVAYGAEYFRWFAEEAVRLPGRYGQSPSGIGHIAVTRAPVGPVLAITPWNFPIAMATRKIAPALAAGCPVLVKPASETPLTMVKVGEIIASVFDTFNIPQGLVSIITTTRDAELSAELMADPRLAKVTFTGSTNVGRILVRQSADRLLRTSMELGGNAAFVIDEAADLDEAVSGAIAAKLRNAGQVCIAANRFLVHESRAAEFTSKLATAMQNTPIGPVISARQRDRIAALVDEAITDGARLIIGGEVPDGSGFFYPATILADVPAQSRIVHEEIFGPVATIATFTDLAEGVAQANSTEFGLAAYGFSNNVKATQYMAEHLEAGMVGINRGAISDPAAPFGGIGQSGFGREGGTEGIEEYLSVRYLALP

SEQ ID NO: 12483 - protein, 144 aa, Triticum aestivum
  misc_feature (122)..(122): Xaa can be any naturally occurring amino acid
MAEEQQHQRWQEGHRLCANNCGFFGSPATLDLCSKCYRDLYQQQPAGAAAGPSAPTASAFQHSSSAVSGAAAVSPDLEPPATAPAGAKAGRCSSCRKRVGLTGFACRCGATFCGVQRYPERXACAFDFRAAGRDASRAQPVSRG

SEQ ID NO: 12484 - protein, 503 aa, Gossypium hirsutum
MAVQVPSRQLFIDGEWREPILKERLPTINPATEEIIGNIPAATAEDVELAVAAARRALSRNKGKDWATAPGAVRAKYLRAIAAKVTERKTELAKLEAIDCGKPLDEAVWDIEDVAGCFEYYADLAEGLDARQKAPVSLPMETFKSYVLKEPIGVVGLITPWNYPLLMATWKVAPSLAAGCAAILKPSELASITCLELAKVVKGSRLPPGVLNILAGLGPEAGAPLASHPDVDKIAFTGSSATGSKIMAAAAQMVKPVSLELGGKSPIIVFEDVDLDKAAEWTAFGCFWTNGQICSATSRLIVHENIAREFLDRLVKWTKNIKISDPFEEGCRLGPVVSGGQYEKVLKFISTAKSEGATILSGGVRPEHLKKGFFVEPTIITDVTTSMQIWREEVFGPVLCVKTFRTEEEALELANDTHYGLGAAVISNDLERCDRVSKNLQAGIVWVNCSQPCFCQAPWGGNKRSGFGRELGEWGLDNYLSVKQVTQYVSDEPWGWYRSPSKL

SEQ ID NO: 12485 - protein, 128 aa, Corynebacterium glutamicum ATCC 13032
MAKLTKDELIEAFKEMTLIELSEFVKEFEEVFDVTAAAPVAVAAAGAAGGEAAAAEEKDEFDVVLEDAGAKKIGVIKAVRELVSGLGLKEAKELVEGAPKAILEGANKDDAEAAKAKLEEAGAKVTLK

SEQ ID NO: 12486 - protein, 162 aa, Brassica napus
LASFLKQASEDAKKIVDEERAFARAEIESARAAVQRVEEALREHEQMSRASGKQDMEDLMKEVQEARRIKMLHQPSKVMDMEYELRALRNQLAEKSKHFLQLKKKLALCRKSEENVSLLYEIDGNEALGSCLRVRPCSDEAPESLKCTIQWYRSSSDDSKNE

SEQ ID NO: 12487 - protein, 333 aa, Triticum aestivum
MKTLLILTILAMAITISTANMQVDPSGQVQWPQQQLVPQPQQPLSQQPQQAFPQPQQTFPHQPQQQVPQPQQPQQPFLQPQQAFPQQPQQPFPQTQQPQQPFPQQPQQPFPQTQQPQQPFPQQPQQPFPQTQQPQQPFPQFQQPHQPFHQPQQQFPQPQQPQQSFPQQQRPFIQPYPQQRLNPCKNILLQQCKPASLVSSLWSIIWPQSDCQVMQQQCCQELAQIPQQLQCAAIHSVVHSIIVQQQQQQQQQQQQQQQQGMHILLPLSQQQQLGQGTLVQGQGIIQPQQLAQLEAIRSLVLQTLPTMCNVYVPPECSIIRAPFASIVAGIGGQ

SEQ ID NO: 12488 - protein, 373 aa, Aspergillus nidulans FGSC A4
MTIPLYDQLLSHQAVNEAFVLYPGGSFGYEKRDIPTLQAERDVLVRVVATGLCGSDVHYWQHGRIGRYVVEDPIVLGHESSGIVVQCGSQSGLTVGDRVVLEPGIACNTCHFCRAGRYNLCREMRFAATPPYNGTLATYYRVPAECCYKLPSHVSLRDGALIEPLSVAVHSCRLAGDMQEKSVVVFGAGPVGLLCAGVARAFGASTVVVVDVVMSRLQSAVKYGATHTHQATSESAEENAIAILGTAGLGLGADIVLDATGAEPCMNSGIHALAPGGTFVQVGLGRPNPSLPVGQICDKEIVFKGSFRYGPGDYKTAIGLVSSHRIRLEGLVTHEFSFSQAEEAFHNVASRAGVKSVIYGPGVDEHVARATLS

SEQ ID NO: 12489 - protein, 272 aa, Microbulbifer degradans 2-40
MNKARNKVKEIMPAVDVVIEVLDARLPASSTNPMIETLRGDKPYLKVLSKSDLADPTITKAWQAFFREQRNMDSLAITTDKVSIAKTIPDRIRKLLPNRGTSLKPIRALIMGIPNVGKSTLINTLAGKKIAPVGNEPAVTKAQQKIRISDNFFLIDTPGMTWPGSKNEMINYRLAASGAIRDTALEYDDLAVFAMDYMLQRYPEAIRKRYQFDELCESATAMLEELAMKRGCKKNGLPDLTRIGELFVRELRAGKLGRFSLEEPLVSYRKRE

SEQ ID NO: 12490 - protein, 267 aa, Pseudomonas putida KT2440
MSVPSFGLGTFRLTGQTVIDSVKSALAVGYRVIDTAQIYKNEAEVGQAIAESGVPRSELFITTKIWVDNYAADKLIPSLRDSLQKLRTDYVDLLLIHWPAPGNGVELPEYMKALADAKQQGLARQIGVSNFNIELTRQAIAVVGKGEIATNQIELSPYLQNSKLTAFLKEQGITVTSYMTLAYGKVLKDPVLAQIAAKHKATVAQVALAWALQLGYAVIPSSTKRENLASNLLARGLTLDTDDMARIAKLERNGREVSPDGLAPTWD

SEQ ID NO: 12491 - protein, 272 aa, Triticum aestivum
MGNHVMSERTTLDHCYSKQIHQKGRSNVITEDPLQVKNKMTNYLMSTETTLDHYNVKPSNQKGRKNVKFEDLPEDVLRTILSKLPVKEVLKTSALSSQWRYSWTICPKLSFNSVAVRGGIRLDEQKNEQQNFIDDVSLVLQKYQGKEVENFEVKYAFDSKLVDHLNCWVSFAVSSRMRNLALDLAPTKSGGRDDRYAFPFGLFDSESLARLQCIQLSFVLLKLPMQFRGFPNLRKLDLNLLHVTSNDLENMLSNCYSLEWLSIVRCHLNDEL

SEQ ID NO: 12492 - protein, 336 aa, Gossypium hirsutum
MESDTIECVSSIDEIVEDHEIPHHNLLHHPHPRHAPHHQFSSSKPHHNGTNNVNSISNIVGPTAIAPAASVHELLECPVCTNSMYPPIHQCHNGHTLCSTCKIRVHDRCPTCRQELGDIRCLALEKVAESLELPCKYYKLGCPETFPYYSKLKHEGICIYRPYNCPYAGSECSVVGDIPFLVAHLRDDHKVDMHTGCTFNHRYVKSNPREVENATWMLTVFHCFGQYFCLHFEAFQLGMAPVYMAFIRFVGDETEARNYSYSLEFGANGRKLIRKSAPRSIRDSHRKVRDSHDGLIIQRNMALFFSGGDRKELKLRVTGRIWKEQQNPDANMCIPN

SEQ ID NO: 12493 - protein, 411 aa, Neurospora crassa
MAGQPMESRFGRMSIHDENNDPSDGARLQQKARELKSKIAQRKNPPIISSEPPSPRKPQRTVPVATKSSTIVSSAAHKSTTYAGIRRVDDDDHDELSQPMASASVSSTGTSTSESSSSAGYEQSISPKQFHLGMFEIGRPLGKGKFGRVYLARERSSGFICALKVLYKSELQHGTGVEKQVRREIEIQSNLRHPNILKLYGHFHDSKRIFLILEYAGKGELYKHLRKENRFPEWKAAQYVAQMASALKYLHRKHVIHRDIKPENILVGIHGEIKISDFGWSVHAPNNRRQTLCGTLDYLPPEMIRSGSKDNWYNEKVDLWSLGVLTYEFLVGEAPFEDTPIMTQKRIARADMTIPEWVSKEAKDLIKKLLVLDPEKRLPLEEVENHPWILKHCVKGERAANREKMASKMGN

SEQ ID NO: 12494 - protein, 321 aa, Parasitella parasitica
MAVDYLTLDRTGDKMPLRGFGCWKIEKKDAENTIYQAIKIGYRLFDGACDYGNEVEVGRGINKAIKEGLVKREELFIVTKLWNTFHSKQHVRTAFDRQLKDWGLEYFDLYLIHFPIPLQYVDPAVSYPPEWYVPHADKLNFERSPIHECWAEMEKLVQAKLTRNIGVANFNCQAILDLLSYSKIKPAVLQIEIHPLLPQERLVKWVQEQGIQVTAYSSFGPTSYVDLCESGKTYSSLLANADVKSIANKHNVNTGQILLRYALDRNIAVIPKSVHEDRMKSNLDILNIQLDQDDRKILNSLKTNQRFNDPMIFGFGLPLFD

SEQ ID NO: 12495 - protein, 474 aa, Bacillus thuringiensis serovar konkukian str. 97-27
MKKHLYINGDWKSVNTYKPLYAPYSEETLAEIAQGTEEDVKEAVAAAKNAMKEMNTLSAYDRATILEKVAQKMDERREEFAEIIAKEAAKPIRAARGEVDRTVQTYKFAAEEAKRIYGETLPLDAAPGADGRIAYTIRKPIGVIGAITPFNFPLNLVAHKVGPAIAAGNTVVLKPADQTPLSSYALIELFEEAGLPKGALNIISGPGSTVGEAIVTNDDVASITFTGSPKVGIGIKAKAGLKRVTLELGSNAAVIIDEDVELTDELIERVKWGAFVNNGQVCISVQRVFVHEERMDDFLSKLRKAMETVVVGDPLIEETDVSALISKKDVERIDNWVQEAVKEGANVLYGGNKRDERVFEPTVLTNVPEHVSVQCQEVFGPLMTVNTFKEFDEAIEQVNNSRYGLQAGVFTNNLFKAMRAIDELEVGGVMINDIPTFRVDHMPYGGVKESGTGREGIKYAIEEMTEMKLVCIKK

SEQ ID NO: 12496 - protein, 171 aa, Spinacia oleracea
MASDSSAQPKSVHEFVVRDARGNDVDLSIYKGKVLLIVNVASQCGLTNSNYTEMTELYEKYRELGLEILAFPCNQFGNQEPGSNEEVLEFACTRFKAEYPIFDKVDVNGSNAAPIYKFLKSSKGGLFGDGLKWNFTKFLVDKDGNVVDRYAPTTSPKSIEKDVKKLLGIQK

SEQ ID NO: 12497 - protein, 71 aa, Glycine max
  misc_feature (50)..(50): Xaa can be any naturally occurring amino acid
LCGAAVTTVNRAGACMVSPFTGGKSMAGFPTMNTNTDITFIVSNWGRVAXMQAWPPVGQKMFETLAYLPDL

SEQ ID NO: 12498 - protein, 250 aa, Capsicum annuum
MGKCYPTVSEEYLKAVDKCKRKLRGLIAEKNCAPLMLRLAWHSAGTYDVCSKTGGPFGTMRFKTEQSHGANNGIDIALRLLEPLGEQFPILSYADFYQLAGVVAVEVTGGPDVPFHPGREDKPEPPVEGRLPDATKGSDHLRDVFVKQMGLSDQDIVALSGGHTLGRCHKERSGFEGPWTANPLIFDNSYFKELLGGEKEGLLQLPSDKALLSDPAFRPLVEKYAADEDAFFADYAEAHLKLSELGFAEA

SEQ ID NO: 12499 - protein, 237 aa, Glycine max
  misc_feature (186)..(186): Xaa can be any naturally occurring amino acid
MTSASELFHSRRHRLGRSALDLGLDTELNAADSLRRHYHLRRLRHHPERASDRIDGRYRRSFASESVDSEENVRSSLRGSDSERLPVGVVLARARLLQRLRGEPLSTNRQYDRDSFGEDRESELSNEDPTRASLVSDLTSQMARSQFLQELNTKPPGLTQEALDCLHQEVFSSSGNEIGLESRVLXQDCSICLESFTDGDELIRLPCGHKFHSVCLDPWIRCCGDCPYCRRSIVVIN

SEQ ID NO: 12500 - protein, 335 aa, Saccharomyces cerevisiae
MSEPAQKKQKVANNSLEQLKASGTVVVADTGDFGSIAKFQPQDSTTNPSLILAAAKQPTYAKLIDVAVEYGKKHGKTTEEQVENAVDRLLVEFGKEILKIVPGRVSTEVDARLSFDTQATIEKARHIIKLFEQEGVSKERVLIKIASTWEGIQAAKELEEKDGIHCNLTLLFSFVQAVACAEAQVTLISPFVGRILDWYKSSTGKDYKGEADPGVISVKKIYNYYKKYGYKTIVMGASFRSTDEIKNLAGVDYLTISPALLDKLMNSTEPFPRVLDPVSAKKEAGDKISYISDESKFRFDLNEDAMATEKLSEGIRKFSADIVTLFDLIEKKVTA

SEQ ID NO: 12501 - protein, 340 aa, Xanthomonas campestris pv. campestris str. ATCC 33913
MKALVKREASKGIWLEQVPVPTPGPNEVLIKLEKTAICGTDLHIYLWDEWSQRTITPGLTIGHEFVGRVAELGSAVTGYQVGQRVSAEGHIVCGHCRNCRGGRPHLCPNTVGIGVNVNGAFAEYMVMPASNLWPIPDQIPSELAAFFDPYGNAAHCALEFDVIGEDVLITGAGPIGIIAAGICKHIGARNVVVTDVNDFRLKLAADLGATRVVNVSKTSLKDVMADLHMEGFDVGLEMSGNPRAFNDMLDCMYHGGKIAMLGIMPRGAGCDWDKIIFKGLTVQGIYGRKMYETWYKMTQLVLSGFPLQKVLTHQLSIDEFQKGFDLMEEGKAGKVVLSWN

SEQ ID NO: 12502 - protein, 94 aa, Brassica napus
MAGVGRNMVAPLLVLNLIMYLIVIGFASWNLNHFINGLTNRPGVGGNGATFYFLVFAILAGVVGAASKLAGVHHVRTWRGDSLATSASSSLVAW

SEQ ID NO: 12503 - protein, 504 aa, Arabidopsis thaliana
MLIVRSFTILLLSCIAFKLACCFSSSISSLKALPLVGHLEFEHVHHASKDFGNRYQLIPLAVLHPKSVSDIASTIRHIWMMGTHSQLTVAARGRGHSLQGQAQTRHGIVIHMESLHPQKLQVYSVDSPAPYVDVSGGELWINILHETLKYGLAPKSWTDYLHLTVGGTLSNAGISGQAFRHGPQISNVHQLEIVTGKGEILNCTKRQNSDLFNGVLGGLGQFGIITRARIALEPAPTMDQEQLISAQGHKFDYIEGFVIINRTGLLNSWRLSFTAEEPLEASQFKFDGRTLYCLELAKYLKQDNKDVINQEVKETLSELSYVTSTLFTTEVAYEAFLDRVHVSEVKLRSKGQWEVPHPWLNLLVPRSKINEFARGVFGNILTDTSNGPVIVYPVNKSKWDNQTSAVTPEEEVFYLVAILTSASPGSAGKDGVEEILRRNRRILEFSEEAGIGLKQYLPHYTTREEWRSHFGDKWGEFVRRKSRYDPLAILAPGHRIFQKAVSYS

SEQ ID NO: 12504 - protein, 479 aa, Mesorhizobium sp. BNC1
MNDLNLTTLEGGQTTISVPIIEALSSQLRGIALTPADAGYEEPRTIWNAMIDRRPGLIIRCAGAADVVSAVRFARENNLLVAVRGGGHNIAGNAVCDGGLLIDLSPMKSVRVDAALRRAWVEPGATLADVDKETQAFGLVVPSGINSTTGIAGLTLGGGFGWLTRKFGLTLDNLLSADVVTANGELLRTSLSENPDLFWAIRGGGGNFGVVTAFEFQLHDFGPQVLSGLVVHPFDNAASVLQQYREALDDAPDELTCWAVMRQAPPLPFLPAEWHGKEILALAMCYCGDIAEGEKATARLRSIGRPIADVVAPTPFTAWQQAFDPLLTPGARNYWKSHDFGGLSDETIDVVLEAIRRLPGPECEVFIGHVGGAAGRIATEATSFPQRSSHYVMNVHARWREPEMDQACIDWARGLFEAAKPYAIGTAYINFMPADETDRVAAAYGPNYQRLAELKARYDPTNLFRLNQNVRPTAELRAA

SEQ ID NO: 12505 - protein, 421 aa, Arabidopsis thaliana
MEKKGSVLMLRYEVGKFLGQGTFAKVYHARHLKTGDSVAIKVIDKERILKVGMTEQIKREISAMRLLRHPNIVELHEVMATKSKIYFVMEHVKGGELFNKVSTGKLREDVARKYFQQLVRAVDFCHSRGVCHRDLKPENLLLDEHGNLKISDFGLSALSDSRRQDGLLHTTCGTPAYVAPEVISRNGYDGFKADVWSCGVILFVLLAGYLPFRDSNLMELYKKIGKAEVKFPNWLAPGAKRLLKRILDPNPNTRVSTEKIMKSSWFRKGLQEEVKESVEEETEVDAEAEGNASAEKEKKRCINLNAFEIISLSTGFDLSGLFEKGEEKEEMRFTSNREASEITEKLVEIGKDLKMKVRKKEHEWRVKMSAEATVVEAEVFEIAPSYHMVVLKKSGGDTAEYKRVMKESIRPALIDFVLAWH

SEQ ID NO: 12506 - protein, 159 aa, Saccharomyces cerevisiae
MSEITLGKYLFERLKQVNVNTIFGLPGDFNLSLLDKIYEVDGLRWAGNANELNAAYAADGYARIKGLSVLVTTFGVGELSALNGIAGSYAEHVGVLHVVGVPSISAQAKQLLLHHTLGNGDFTVFHRMSANISETTSMITDIATAPSEIDRLIRTTFIT

SEQ ID NO: 12507 - protein, 280 aa, Aquifex aeolicus VF5
MRDIVFIERDPYAPIRHCYTVSKILYQGKSPYQEIQVIESPEFGRMLILDGVVQLDEKYEFLYHEYLAHVPLHAHPNPRNVLIIGGGDGGTLREVLKHDIVERAVLVDIDKEVIEVSKKYLPTLSVGFQDPRAIVVNEDGYKYVQDYENEFDVIIVDSTDPVGFAHVLTTEDFFRHVYKALKEDGIFVAQTESIHYHLEMVSNIQQRLKKVFPIVDLYTSVIPIYAGYWWTFSIASKKYPVRTPAREVKVQTKIYDADMHEYAFLPESFYNKIVNGEYKY

SEQ ID NO: 12508 - protein, 302 aa, Escherichia coli
MIKKIGVLTSGGDAPGMNAAIRGVVRSALTEGLEVMGIYDGYLGLYEDRMVQLDRYSVSDMINRGGTFLGSARFPEFRDENIRAVAIENLKKRGIDALVVIGGDGSYMGAMRLTEMGFPCIGLPGTIDNDIKGTDYTIGFFTALSTVVEAIDRLRDTSSSHQRISVVEVMGRYCGDLTLAAAIAGGCEFVVVPEVEFSREDLVNEIKAGIAKGKKHAIVAITEHMCDVDELAHFIEKETGRETRATVLGHIQRGGSPVPYDRILASRMGAYAIDLLLAGYGGRCVGIQNEQLVHHDIIDAIE

SEQ ID NO: 12509 - protein, 161 aa, Triticum aestivum
MDPMDIVGKSKEDVSLPKSTMTKIIKEMLPPDVRVARDTQDLLVECCVEFINLLSSESNDVCSRDDKKTIAPEHVIRALQDLGFKEYVEEVYAAYEQHKLETLDSPKATKFTGIEMTEEEAVAEQQRMFAEARARMNNGAAKPKEPALEPQNQPQQPPQPQ

SEQ ID NO: 12510 - protein, 170 aa, Arabidopsis thaliana
MSSNKIVLTSSDDESFEVEEAVARKLKVIAHMIDDDCADKAIPLENVTGNILALVIEYCKKHVLDDVDDSDDSTEATSENVNEEAKNELRTWDAEFMKEFDMETVMKLILAVNYLNVQDLLGLTCQTVADHMKDMSPEEVRELFNIENDYTPEEEDAIRKENAWAFEDLK

SEQ ID NO: 12511 - protein, 305 aa, Escherichia coli
MIKKIGVLTSGGDAPGMNAAIRGVVRSALTEGLEVMGIYDGYLGLYEDRMVQLDRYSVSDMINRGGTFLGSARFPEFRDENIRAVAIENLKKRGIDALVVIGGDGSYMGAMRLTEMGFPCIGLPGTIDNDIKGTDYTIGFFTALSTVVEAIDRLRDTSSSHQRISVVEVMGRYCGDLTLAAAIAGGCEFVVVPEVEFSREDLVNEIKAGIAKGKKHAIVAITEHMCDVDELAHFIEKETGRETRATVLGHIQRGGSPVPYDRILASRMGAYAIDLLLAGYGGRCVGIQNEQLVHHDIIDAIENMK

SEQ ID NO: 12512 - protein, 432 aa, Actinobacillus pleuropneumoniae serovar 1 str. 4074
MRTTELIELDQKHIWHPYSSITHPIPTYPVERADGVIITLKDGKKLIDGMSSWWAALHGYNHPRLNQAATEQLSKMSHIMFGGLTHEPAAKLSQKLLEILPPELNKIFFADSGSVAVEVAMKMALQYAQASGQKNAKKRTKFATIRSGYHGDTWHAMSVCDPVTGMHGLFNSSLPVQYFLPQPSVKFGEAWRDEAILPLQDLFEQHGDEIAALILEPVVQGAGGMYFYSPVYLQKARELCDRFGILLIFDEIATGFGRTGKLFALQHAEVVPDIICLGKALTGGYLTLSATVTTEKVATVICEGEAKCFMHGPTFMANPLACAIAYESINLLLESDWQANIQRIERQLLEELAPAKHFKSVAEVRVLGAIGVLEMQQPVDLVPLQKLFVEHGIWVRPFGKLVYIMPPFIISQAELTQLTSALLQVLKIAYNE

SEQ ID NO: 12513 - protein, 143 aa, Gossypium hirsutum
GCERTTEGYGCEEDDRRELKHESQCSYRPYSCPYAGSECTVIGDFPYLVAHLKDDHKVDMHNGSTFNHRYVKSNPHEVENATWMLTVFSCFGQYFCLHFEAFQLGISPVYIAFLRFMGDDNEAKNYSYSLEVGGNGRKMIWQG

SEQ ID NO: 12514 - protein, 400 aa, Arabidopsis thaliana
MTKKMRRVGKYEVGRTIGEGTFAKVKFARNTDTGDNVAIKIMAKSTILKNRMVDQIKREISIMKIVRHPNIVRLYEVCLFVSMHLRNFISEVLASPSKIYIVLEFVTGGELFDRIVRNFHTCRQRPLVHKGRLEESESRKYFQQLVDAVAHCHCKGVYHRDLKPENLLLDTNGNLKVSDFGLSALPQEGVELLRTTCGTPNYVAPEVLSGQGYDGSAADIWSCGVILFVILAGYLPFSETDLPGLYRKINAAEFSCPPWFSAEVKFLIHRILDPNPKTRIQIQGIKKDPWFRLNYVPIRAREEEEVNLDDIRAVFDGIEGSYVAENVERNDEGPLMMNAFEMITLSQGLNLSALFDRRQDFVKRQTRFVSRREPSEIIANIEAVANSMGFKSHTRNFKVT

SEQ ID NO: 12515 - protein, 181 aa, Lactuca sativa
MASISSSAVATVNRSTPAQASLAAPFTGLKSNVAFPVTKKANNDFSSLPSNGGRVQCMKVWPPIGLKKYETLSYLPPLSDEALSKEIDYLIRNKWVPCLEFELEHGFVYREHHHSPGYYDGRYWTMWKLPMFGCTDSAQVMKEVGECKKEYPNAFIRVIGFDSVRQVQCISFIVSKPPGVL

SEQ ID NO: 12516 - protein, 175 aa, Glycine max
  misc_feature (112)..(112): Xaa can be any naturally occurring amino acid
  misc_feature (122)..(122): Xaa can be any naturally occurring amino acid
  misc_feature (125)..(126): Xaa can be any naturally occurring amino acid
MASSMISSPAVTTVNRAGAGMVAPFTGLKSMAGFPTRKTNNDITSIASNGGRVQCMQVWPPVGKKKFETLSYLPDLDDAQLAKEVEYLLKKGWIPCLKFELKHSFVYQEHNXSPKYYDRHYXTIXXLAMFRYTNTSQVWKELQETKTTYANNFMHIIKFYNIRQIHYINFIGYEP

SEQ ID NO: 12517 - protein, 475 aa, Rickettsia montanensis
MNLLKNITGKNYINGEFIEFGKQISVINPATLKEIATVPNLGLSEINSAINNTVTSFSSWSQSSFEARIAILRRWYNLVIENIEELSHILTLEQGKVLAESKKEILYGVSFIDWYTYAIHNIHSTIKPGNSKAHKIVTQYEPVGPSAAITPWNFPNAMITRKVVPAIAAGCSVILKPSSLTPLSALVLAKFASDAGLPAGVFNVITGSSDIIGKAFCEDFRLRKLSFTGSTNVGKILYQNAANTLKRLSLELGGNAPFIITADNNLEKVVSDLITAKTRNSGQSCISPNRIFIEESIYEKFIEILKAKFTKLKAGDGFDKESDVGPLINSAAIEKIQKLLADAQSKGAKLICGGKAVDNFIEPTIIIDCLDNMDIFRTEIFGPVVACYKFKDLDEVIERANNTEYGLQGYVYSNNISVVQMIASKLDFGMVSINDPLPANAKAPFAGRKASGFGVEGSFEGIFEYLNTKYINLQH

SEQ ID NO: 12518 - protein, 317 aa, Streptomyces avermitilis MA-4680
MARDYYEVLGVSRSASQDEIQQAYRKLARRHHPDVNKDPGAEERFKDLNEAYSVLSDPKTRARYDRFGEDFRKIPEDFDERVAAGAGGGFRGRRTAGGGGPRVRYAPGFGDDFGAEGIDIEDLFGSMFGAGAARGGVPGADQEAELPLTVEEAYRGGRRTVTLAGPDGQPRRYEVDVPPGVTDGQRIRLAGEGGRGSGDAAAGDLYLRVRIQPHPRFRLDGRDVHVQVPVAPWEAALGATVPVPTPGGGTAKVTVPAGSSSGRRLRLRGEGMPNPRGANGDLYAELRIVVPPTLGDQERELFEELAATSSFDPRRTR

SEQ ID NO: 12519 - protein, 475 aa, Rickettsia rickettsii
MNLLKNITGKNYINGEFIEFGKQISVINPATLKEIATVPNLGLSEINSAINNTVTSFALWSQSSFEARIAILRRWYNLVIENIEELSHILTLEQGKVLAESKKEILYGASFIDWYTYAIHNIHSTIKPGNSNTHKIVTQFEPVGPSAAITPWNFPNAMIARKVVPAIAAGCSVILKPSSLTPLSALVLAKFASDAGLPSGVFNVITGSSDIIGKAFCEDFRLRKLSFTGATNVGKILYQNAANTLKRLSLELGGNAPFIITADNNLEKVVSDLVIAKTRNSGQSCTSPNRIFIEESIYEKFIEILKAKFTKLKAGDGFDKESDVGPLINSAAIEKIQKLLADAQSKGAKLICGGKTVDNFIEPTIIIDCLDNMDIFRIEIFGPVVACYKFKDLDEVIEHANNTEYGLQGYVYSNNISVAQMIASKLDFGMVSINDPLPANAKAPFAGRKASGFGVEGSFEGIFEYLNTKYINLQN

SEQ ID NO: 12520 - protein, 265 aa, Arabidopsis thaliana
MEFERYLGEGSFGSVSLFSYKRRCDVETLYAAVKTSDDAKSLYEEFQILSKFKGCSRIVQCYGSGVEQRLNDKGYVEYTIPMEYAAGGSLSDFMDRFNDKKLPDPMIRKFTRMLLEGLATIHRHGYVHCDLKPENILVFPGSVCDLKLKISDFGLSKRDGDTTWWHPLKSYAGTPIYMSPESISHGEIGKGLDLWSLGCVVLEMYTGKRPWWHTNYELEDLMKCYEPLFPPNLPCDAKLFLMTCFAPEPDERKDALTLLRQSFFR

SEQ ID NO: 12521 - protein, 234 aa, Arabidopsis thaliana
MGRGKIVIRRIDNSTSRQVTFSKRRSGLLKKAKELSILCDAEVGVIIFSSTGKLYDYASNSSMKTIIERYNRVKEEQHQLLNHASEIKFWQREVASLQQQLQYLQECHRKLVGEELSGMNANDLQNLEDQLVTSLKGVRLKKDQLMTNEIRELNRKGQIIQKENHELQNIVDIMRKENIKLQKKVHGRTNAIEGNSSVDPISNGTTTYAPPQLQLIQLQPAPREKSIRLGLQLS

SEQ ID NO: 12522 - protein, 381 aa, Ustilago maydis 521
MSTTGGAAETGANGSVASAQAAVFVQSQPLPADTPQVVGPDFEHQDPNDLLRLLESMSKVGFQASSVSKAIEIVQEMRQWRLSNDAAYLASEDADKPSLSDAQNTQCRIFLGFTSNLVSSGLREVIKFLVKNKMVSALVTTAGGIEEDLIKCLGPTYLGDFALDGATLRKQGLNRIGNLLVPNDNYCKFEDWVMPILDAMRAEQGDNVSHAWSPSRVIERLGKEINDESSILYWAAKNQIPVFCPALTDGSLGDMIYFHSYKNPGLTIDLVKDIRRLNDLSVKAPKAGMIILGGGVCKHQIANAMLFRNGADFSVYINTGQEFDGSDSGARPDEAVSWGKIKSAANGGKSVKVYCDATIIFPMIVAATFAKAYWAERELAN

SEQ ID NO: 12523 - protein, 129 aa, Guillardia theta
MNKVQNIIDQLKDLTLLEAADLVKQIEETFNVSATAAAAPINMVAATAGAGSAEAVEEKTEFDLILEDVPADKKIAVLKVVRGLTGLGLKEAKDLVEAAPKPIKEGMSKADAEAGKKQLEEAGAKATLK

SEQ ID NO: 12524 - protein, 327 aa, Arabidopsis thaliana
MNEVAIKRINRSICNGGVGFGVRKVFGKGSFGSVRLFSYKRRCDGETLYATVKTSDDAKSLYEEFQILSKFKGCPRIVQCYGNGVKQRFNDKGYVEYMIPMEYATGGSLNNFMDRFNDRKLPDPMIRKFTRMLLEGLATIHRYGYVHYDIKPENILVFPGSVYKEGAWRYSYKLKISDFGLSKRDGDTKWWHPLKSYAGTRIYMSPESISHGEIGKGLDLWSLGCVVLEMYTGKRPWWHTNYELEDLMKCYEPLFPPNLPCDAKLFLMTCFAPEPDERKDALTLLRQSFFRRDVNKLTKLLKVDNRNDFTLELKKLRQMLSEIRSMR

SEQ ID NO: 12525 - protein, 175 aa, Triticum aestivum
  misc_feature (24)..(24): Xaa can be any naturally occurring amino acid
MAPAVMASSATTVAPFQGLKSTAXGLPVGRRSSGSLGSVSNGGRIRCMQVWPIEGIKKFETLSYLPPLSTEALLKQVDYLIRSKWVPCLEFSKVGFVFREHNSSPGYYDGRYWTMWKLPMFGCTDATQVLNEVEEVKKEYPDAYVRVIGFDNLRQVQCVSFIAFRPPGCEESGKA

SEQ ID NO: 12526 - protein, 483 aa, Cupriavidus necator
MELQHTALLRTHCLIDGEWTGAQSGAELAVCNPATGERIGSVPLAGAAEAEQAVRAAERALPAWRAQTGKAVPPVLRRWADLMLAHQEDLARLMTAEQGKPLPDARGEVAYAASFLEWFGEEAKRVDGEVLASPRSSQKMLVLREPVGVCAAITPWNFPAAMITRKVGPALAAGCTIIVKPAEQTPLTALALAVLGEQAGVPRGVLQVVTGDAVQIGGVLCASPVVRKLSFTGSTAIGKLLMAQCAGTVKKLSLELGGNAPLIIFDDADMDSAVEGIIASKFRNTRQTCVCANRIYVHDRVYDEVARRLVSAVEQLLPGHGVDSGVTQGPLIDADAVAKVEAHIADALAQGATVLTGGQRHALGGTFFAPTVLANATASMRVAREETFGPLAPLFRFTSEAEVVAMANDTESGLAAYFFSRDMAKIWRVAQGLEYGMVGINTGLISNEVAPFGGVKQSGLGREGSRHGIDEYLETKYLCMEVE

SEQ ID NO: 12527 - protein, 454 aa, Bradyrhizobium japonicum USDA 110
MPLLSRQQRSAAVTLHQIPNTIKTDSFWMPFTANRQFKKAPRLFSSAEGMHYTTVDGRKVIDGSAGLWCVNAGHGRKQIAAAVERQLMTLDFAPTFQMGHPLAFDFAERLAEIAPKGLDRIFFTNSGSESVDTALKIALAYHRATGQSSRTRLIGRERGYHGVGFGGTSVGGMVANRRAFATLLPGVDHIRHTHDLSRNAFAKDQPEHGAELADDLERLVGLHGAETIAAVIVEPVPGSTAVLPPPKGYLQRLREICDKHGILLIFDEVITGFGRLGTPFAANFFGVTPDLMTTAKGITNGTIPCGAVFASRKVHDGMMVGPENQMELFHGYTYSAHPTACAAGIATLDIYKDEGLLTRGASIAEYWRDALHSLKGLPNVVDIRNCGLMGAVELAPRAGVVGARGYDVMVDCFNTGLYLRMSGDSFAMSPPLIVEKSHIDQMVSILGDAIKKVA

SEQ ID NO: 12528 - protein, 177 aa, Triticum aestivum
  misc_feature (119)..(119): Xaa can be any naturally occurring amino acid
  misc_feature (129)..(129): Xaa can be any naturally occurring amino acid
  misc_feature (145)..(145): Xaa can be any naturally occurring amino acid
  misc_feature (151)..(151): Xaa can be any naturally occurring amino acid
  misc_feature (155)..(156): Xaa can be any naturally occurring amino acid
MAPTVMASSATSVAPFQGLKSTAGLPVSRRSNGASLGSVSNGGRIRCMQVWPIEGIKKFETLSYLPPLSTEALLKQVDYLIRSKWVPCLEFSKVGFIFREHNASPGYYDGRYWTMWNCXYFGCTDATQXDQRVEEVKKEYPDAYXRIIGFXTCAXXCVSSCLQHGLKIGRLTVTTAI

SEQ ID NO: 12529 - protein, 77 aa, Glycine max
MGLWTLLEGFLLLANALAILNEDRFLTPRGWGLSDFSAGQTKSFKGQLIGLIYATQYLRFPLILLNSVFIIVKLVSG

SEQ ID NO: 12530 - protein, 347 aa, Gibberella zeae PH-1
MTDDTHRKIWQPLHPTIRDRLDPQYVAYHEAHLQYIEPDEIKDWDGSTRTKKVSLPPGGTKPVPVGSIDDYHVGRFKVRVYTPTGQCDERGWPVLVWLHGGGWAVGGLNNGTDLCCWACEKARCLVVSVDYGLAPENPFPVAVEDSIDAVRWVASCPAQLQKIDTSRISVSGTSSGANLAIVAALSASNPEAALPTARPSLSNTIAHPPVSLLLFIPVVDNTATVDGVWKPNAEVAPWLTPSRMEWYRKLYFTQDEHRSRWDASPNLAPDTLLKKLPKTWIAIAEMDILATEASTFSQQLKGLGVNVETLLVEGGTHSILSLHGVIDRGYKMIEDAIKHLQETFGTG

SEQ ID NO: 12531 - protein, 350 aa, Glycine max
  misc_feature (103)..(103): Xaa can be any naturally occurring amino acid
  misc_feature (195)..(195): Xaa can be any naturally occurring amino acid
MFTCIACTKTDDKDEEGGSRESGTPSTKEAVKSLTTQIKDMALKFSGAYKQCKPCTGSSSYKKGHRPYPDFDTISEGVPYPYIGGASSSSTPAWDFTTSHYPXGRSDPRFAGAYGGDRTPRGRDSSSVCDVVLEDEDEPKEWMAQVEPGVHITFVSLPNGGNDLKRIRFSREMFNKWQAQRWWGENYDRIMELYXNVQRFNKQALNTPPRSEDEQRDSSYSRLTSARESPMASNKDWTPRSHYKFSGSRGYYPSEPLDHGGGSGQYHAGPSMEPARDTTASRDEPSISNASEMETEWVEQDEPGVYITIRQLADGTRELRRVRFSRERFGEVNAKTWWEENRERIQAQYL

SEQ ID NO: 12532 - protein, 568 aa, Zea mays
APRGVEPRLFVARAAGPAQQAADAKACSALCSPAARAVPAMESFGVPPAPVAAPEKRKKPLDLKDPVPAAAAAAANGGGATKASPAAKWAEKKKLVGGDAGYVLEDVPHLTDYLPQLPTYPNPLQDNPAYSVVKQYFVNPDDTVTQKIVVHKTSARGTHFRRAGPRQRVYFQPDEVNAAIVTCGGLCPGLNTVIRELVCGLYDMYGVTSVVGIEGGYKGFYSKNTVALTPRSVNGIHKRGGTVLGTSRGGHDTAKIVDCLQDRGINQVYIIGGDGTQKGASVIYEEVRRRGLKCAVVGVPKTIDNDIAVIDKSFGFDTAVEEAQRAINAAHVEAESAENGIGVVKLMGRNSGFIAMYATLASRDVDCCLIPESPFYLEGKGGLLEFVERRLKDNGHMVIVVAEGAGQDLIAKSMNSVDTQDASGNKLLLDVGLWLSQKIKDHFKKKPRFPITLKYIDPTYMIRAVSSNASDNVYCTLLAHSALHGAMAGYTGFIVAPVNGRHAYIPFYRITEKQNKVVITDRMWARVLCSTNQPCFLSHEDVENMKHDDDEHHLHNTLLLDSPENSSK

SEQ ID NO: 12533 - protein, 126 aa, Zea mays
FQAQDPVEASHFQSDGRVLYCLELTKNFNSDDTDTMEQEVTVLLSRLRFIQSTLFHTDVTYLEFLDRVHTSELKLRAQGLWEVPHPWLNLLIPRSSIRRFAKEVFGKILKDSNNGPILLYPVNKSK

SEQ ID NO: 12534 - protein, 491 aa, Ralstonia eutropha JMP134
MKTQEVLPICIAGEWRLGTGDRYATRYPATGEVVAELNAASLADVEEAVQGAQRAFETSGWARRKPHERAAVLYRVAELIRAQAEPLAQRQRLDNGKPISETRALVASAASTFQFFAAACETLEEQITPQRGECLTMSVYEPMGVVAAITPWNSPIASEAQKMAPALAAGNAVVVKPAEVTPLMALELARICDEAGVPKGLISVLPGKGSVIGDAITKHPLVRRVSFTGGTTTGKHIAHIAADKMMPVSLELGGKSPTMVFDDADLDHAVNGVLYGIFSSSGESCIAGSRLFVARSQYEPFIERLAAGAAHLRVGDPADERTQMGPLITDRHRDSIESYVAMGVQDGGQLRTGGLRPDVAGLPNGYFYTPTIIEGLDNHARIAQEEIFGPVLVAIPFDDEDDLIEQANDSVYALAAGIWTRDYKRAWRVARAVQAGNVWINTYKQFSISAPFGGWRDSGLGREKGRLGILQYMEQKSVYWGLNEQPLPWAN

SEQ ID NO: 12535 - protein, 221 aa, Azoarcus sp. EbN1
MENRIGTMTRSEASVLSTNRVIRNTYMLLSLTLAFSALTAGASLALGLPHPGIILTLVGYFGLLFLTTKFRDSGLGILFVFALTGFMGYTLGPIVSHYLAMPNGGQVVMQAMGGTAAIFLGLSAYALTSRKDFSFMGGFLVVGILVAFLAGLGAIFFEMPGLSLAVSAMFVLLMSGLILYETSNIIHGGETNYVMATVTLYVSIYNLFTSLLHILGVMNND

SEQ ID NO: 12536 - protein, 91 aa, Glycine max
  misc_feature (45)..(45): Xaa can be any naturally occurring amino acid
  misc_feature (51)..(51): Xaa can be any naturally occurring amino acid
  misc_feature (80)..(80): Xaa can be any naturally occurring amino acid
MSRKIESLGVERVISGEGSHGMFGGYLYFSKAPSKEEFLPEAMRXIKALLXYDCLRATRSTFDRGLEARVPFLNKECYEXAMNIDPQCAMI

SEQ ID NO: 12537 - protein, 286 aa, Cucurbita cv. Kurokawa Amakuri
MALPVVDTEYLKEIEKARRDLRALIANRNCAPIMLRLAWHDAGTYDVSTKTGGPNGSIRNQEEYSHGSNNGLKKAIDFCEEVKSKHPKITYADLYQLAGVVAVEVTGGPTIDFVSGRKDSRISPREGRLPDAKKGAPHLRDIFYRMGLSDKDIVALSGGHTLGRAHPERSGFDGPWTEDPLKFDNSYFVELLKGESEGLLKLPTDKALLEDPEFRPYVELYAKDEDAFFKDYAESHKKLSELGFTPGSARAIANDSTVLAQGAVGVAVAAAVVILSYFYEIRKNLK

SEQ ID NO: 12538 - protein, 454 aa, Listeria monocytogenes str. 4b H7858
METYFEDAVGGIHLLPFFPSTGDRGFAPSDYTTVDSDLGSWEIIEKLGEKYYLMFDFMINHISRESLFFQDFKKEHLNSKYKDMFIRINDFFPPGRPNEKDLDLIYKRKDKAPFQEVEFADGGTELVWNTFGEEQIDLDVTAEVTKEFIRQTIKNMAAHGCSILRLDAFAYAIKKLDTNDFFVEPEIWGLLDEVKAEAAKYDMELLPEIHEHYSIQMKIANHDYYIYDFALPMVMLYSLYSGRVERLAKWLEMSPMKQFTTLDTHDGIGVVDARDLLTDEELDYTSAELYKIGANVKKIYSSEKYNNLDIYQINSTYYSALGDDDKSYLLARVIQCFAPGIPQIYYVGLLAGKNDIDLLEETKEGRNINRHYYTIDEIKNEVKRPVVKALCNLLRFRNTSEAFDLEGSIEIETPSSNEIVIIRKNKTNKITAILKANLSTKTFQISENERNILI

SEQ ID NO: 12539 - protein, 327 aa, Zea mays
SSSQRPAYSVLAYIEPSALRVRLAVRHPSQDYPGGRRTEGKGTEPTTNPMPPHRAGGAAGGGDTSAFFAATLVLWAVSVGFEIGVRGRRELAPVAAGFAFFQAANTAVRGSVSRDPLFVNTAVSLLHSSLTSVSVIFVLANQWRNKGLENMFEHEELFGGSWIGAYSALCFSCGYFAYDQLDMLRYRLYSGWLPGILMHHLILLICFTLALYRNVTINYLNLSLVCELHSIFLHVRKVRRMVGFRDFDRTVVKLEWVLNWTTFVTARVICHILITYKLISDAHKFGKGIELPLALLGMAGMNLLNIFLGLDLLKAFTRERNKQNHQD

SEQ ID NO: 12540 - protein, 486 aa, Vibrio vulnificus YJ016
MEVTAHYIGGKPFVGDTGESFATLNPATGEVLAHIEQADERVLAHAIESAKLGFSVWSSMSAAERSRCLLKAAQLIRDHNDELAELEVRDTGKPIQEASVVDIATGADVIEYFAGLVNGLGGEQQSLGSNQFFYTRREPLGICAGIGAWNYPIQIAMWKAAPALAAGNAMIFKPSEETPLSALKLAELFTQAGVPDGVFNVVQGDYRVGQMLTAHPEIAKVSFTGESGTGKKVMADSAATLKPVTMELGGKSPLIIFDDADLDDAVSAAMVANFYTQGEVCTHGTRVYVQRAMYDAFVEQLKERTEKLIVGDPMNMETQIGSLISKSHLEKVLGAISSAKESGATLLTGGFQVTERGLEKGCFVAPTVFVDCRDEMPHVQNEIFGPVMSVLVFDDEDEVIARANNTQYGLAAGVFTQNLSKAHRVIHQLQAGICWINTWGNSPAEMPVGGYKLSGIGRENGQETLLHYTQTKSVFVELGAFDSPYA

SEQ ID NO: 12541 - protein, 212 aa, Zea mays
  misc_feature (53)..(53): Xaa can be any naturally occurring amino acid
  misc_feature (191)..(193): Xaa can be any naturally occurring amino acid
MDEEEHEVYGQEIPEDGDMDGADVDMAASGDDAAKLQELDEMKRRLKEMEEEXAALRDMQAKVAKEMQGGDPSTSTAEAKEQVDARSVYVGNVDYACTPEEVQQHFQACGTVNRVTILTDKFGQPKGFAYVEFLEQEAVQEALNLNESELHGRQIKVAPKRTNVPGMKQRPPRGYNPYHGYPYRSYGAPYXXXYGYGRAPRFRRPMRYRPYF

SEQ ID NO: 12542 - protein, 363 aa, Yersinia pestis
MTKTYHIAVLPGDGIGPEVMAQASKVLDAVRQRFGLKISTSVYDVGGAAIDRHGSPLPAATVAGCEQADAILFGSVGGPKWEHLPPAEQPERGALLPLRKHFKLFSNLRPARLYQGLEDFCPLRSDIAARGFDILCVRELTGGIYFGQPKGREGQGMHERAFDTEVYHRFEIERIARIAFESARKRRSKVTSIDKANVLQSSILWREVVNGIAADYPDVALSHMYIDNATMQLIKDPSQFDVLLCSNLFGDILSDECAMITGSMGMLPSASLNEQGFGLYEPAGGSAPDIAGKNIANPIAQILSLTLLLRFSLGKDDAADAIERAINQALEQGYRTADLAGDGHAIGTHEMGDIIAKFVVEGV

SEQ ID NO: 12543 - protein, 259 aa, Hydrogenobacter thermophilus
MERIWKTGITQHIGHETYIRGYRLLDLVGNLSFAQAIYLILKGELPTERESRMMEAMLVSVIDHGIAPPSAIAARSVASGGNSLNVGVAAGVLAFGSAHGGALEDAMRFIQEGVSSKRSVEDIVKEYLETKKPIPGYGHRYYKDFDPRTKRLMDIARVLEFYGEHCKFAEDVAEEIGRQKGKKLVLNVDGAIAAIASEMGFDWRLGKGFFIIGRVPGLVAHVYEELTTEKPFSKRLDEERDVEYTGSPPRELPQELKKI

SEQ ID NO: 12544 - protein, 335 aa, Xanthomonas campestris pv. campestris str. ATCC 33913
MTQTITVIRGDGIGPEIMDATLFVLDALQAGLTYEYADAGLVALEKHGDLLPESTLASITKNKVALKSPLTTPVGEGFSSINVAMRRKFDLYANVRPAKSFPNTKSRFADGVDLITVRENTEGAYLSEGQEVSADGEVAVSGARVTRKGSERIVRYAFDLARATGRKKVTAVHKANIIKSTSGLFLKVARDVATQYPEIEFQEMIVDNTCMQLVMRPEQFDIIVTTNLFGDIISDLCAGLVGGLGLAPGANIGVDAAIFEAVHGSAPDIAGQGKANPCALLLGAAQMLDHIGQPQNAERLREAIVATLEAKDSLTPDLGGTGNTMGFAKAIASRL

SEQ ID NO: 12545 - protein, 176 aa, Glycine max
  misc_feature (115)..(115): Xaa can be any naturally occurring amino acid
  misc_feature (143)..(143): Xaa can be any naturally occurring amino acid
  misc_feature (153)..(153): Xaa can be any naturally occurring amino acid
MASSMISSPAVTTVNRAGAGMVAPFTGLKSMAGFPTRKTNNDITSIASNGGRVQCMQVWPPVGKKKFETLSYLPDLDDAQLAKEVEYLLRKGWIPCLEFELEHGFLYHEHNRSPXYYDGRYWTMWKLPMFGCADASHVLKDLXDAKTGYPDGXVRIMGCDTFGSADRELICYNLPR

SEQ ID NO: 12546 - protein, 410 aa, Glycine max
MPGHRSKSEKHGGGGEKPLRRDPYEVLGISRNSTDQEIKTAYRKMALKYHPDKNANDPKAADMFKEATFSYNILSDPDKRRQYDSAGFEAVESDNQELELDLSSLGAVNTMFAALFSKLGVPIKTTVSATVLEEALNGLVTIRPLPLGHNIAKRVEKQCAHFYSVTITEEEAQAGFVCRVQSPDKSKFKLLYFDQEDNSGLSLALQEDSAKTGKVTSAGMYFLGFPVYRLDQTMNSIAAAKDPDTSFFRKLDAFQPCELTELKAGTHVFAVYGDNFFKSANYTIEALCAAPFSEEKENLRNIEAQILSKRAEISKFEAEYREVLAQFSDMTNRYAHEMQAIDELLKNRNEIQASYTSAPLKRTTSRSRSKNSSKEAKEDGQAKEKRSTRERPKKKKWYNLHLRVDKRKAC

SEQ ID NO: 12547 - protein, 505 aa, Brucella melitensis 16M
MNKVEFSRTVKPAFAKRYGNFIGGKWVEPRSGRYFENTSPVNGQVLCEVARSDAADVEAALDAAHAARELWGRTSVAERALILNRIADRIEENLPALAAAETWDNGKPIRETTNADLPLAVDHFRYFAGVIRAQEGGISEIDHDTVAYHFHEPLGVVGQIIPWNFPLLMATWKLAPALAAGNCVVLKPAEQTPASILVLMELIADILPPGVVNIVNGFGLEAGKPLASSPRIAKIAFTGETTTGRLIMQYASQNLIPVTLELGGKSPNIFFKDVAAEDDDFLDKAIEGFVMFALNQGEVCTCPSRALIQESIYDRFMEKALKRVEAIVQGDPLDPATMIGAQASSEQLEKILSYLDIGRQEGAEVLAGNERNMLPGDLAGGYYVKPTVFKGHNKMRIFQEEIFGPVVSVATFKDDAEALSIANDTLYGLGAGIWTRDGTRAYRFGRAIKAGRVWTNCYHAYPAHAAFGGYKQSGIGRENHLKMLDHYQNTKNMLVSYSPKKLGFF

SEQ ID NO: 12548 - protein, 331 aa, Cicer arietinum
MSNKIWPPPPSNNPYEYLKIHHNPNDTLTRNLVDPHTSPSSNTTLPINVLTKDLTINQSHQTWLRLFLPKNSTNPNQNNKLPLIIFFHGGGFILLSAASTIFHDFCVELADTVEAVVASVEYRLAPEHRLPAAYDDAMEALTFIKSSEDEWLQNYVDFSTCYLMGNSAGATIAYNAGPMCNLKKVNDFEPLKIQGLILSQPFFGGTQRSESELRLENDPVLPLSVGDLMWELALPIGVDRDHKYGNLTAENDLDEKFDKIKDQGWRVLVSGNGGDPLVDRYKELVELMEKKGVEIVKDFEEEGFHGIEFFEPSKAKKLIGLVKGFISSFVV

SEQ ID NO: 12549 - protein, 302 aa, Cucumis sativus
MAFAKAQKTKAYFKRYQVKFKRRREGKTDYRARIRLINQDKNKYNTPKYRFVVRTSNKDITAQIISASIAGDLVLASAYSHELPQYGLEVGLTNYAAAYCTGLLLARRVLKMLEMDAEYEGNVEATGEDYSVEPADTRRPFRALLDVGLIRTTTGNRVFGALKGALDGGLDIPHSDKRFAGYAKNGQQLDVEVHRKYIFGGHVAAYMRTLMEDEPEKYQSHFSEYIKKGIEADELEGLYKKVHAAIRANPIAKKSDKPQPKAHKRYNLKKLTYDERKARLVERLNALNSAADGDDDDDEDDE

SEQ ID NO: 12550 - protein, 214 aa, Zinnia elegans
MAIEICVKAATGAPDDLGDCPFSQRVLLTLEEKKVPYKTHLINLDNKPEWFVEVNPDGKVPLIKFDEKWVSDSDVIVGLIEEKYPEPSLSTPSEFASVGSKIFPKFVGFLKSKDEKDGTEQALLDELNELEEHLKKNGPYVNGEKISAVDLSLAPKLYHLKVALGHFKKWTVPESLTHVHDYMKSLFSRESFEKTKPAKEEYVVAGWAPKVNNA

SEQ ID NO: 12551 - protein, 1342 aa, Escherichia coli O157:H7 EDL933
  misc_feature (1258)..(1258): Xaa can be any naturally occurring amino acid
MSQEYTEDKEVTLTKLSSGRRLLEALLILIVLFAVWLMAALLSFNPSDPSWSQTAWHEPIHNLGGMPGAWLADTLFFIFGVMAYTIPVIIVGGCWFAWRHQSSDENIDYFAVSLRIIGVLALILTSCGLAAINADDIWYFASGGVIGSLLSTTLQPLLHSSGGTIALLCVWAAGLTLFTGWSWVTIAEKLGGWILNILTFASNRTRRDDTWVDEDEYEDDEEYEDENHGKQHESRRARILRGALARRKRLAEKFINPMGRQTDAALFSGKRMDDDEEITYTARGVAADPDDVLFSGNRATQPEYDEYDPLLNGAPITEPVAVAAAATTATQSWAAPVEPVTQTPPVASVDVPPSQPTVAWQPVPGPQTGEPVIAPAPEGYPQQSQYAQPAVQYNEPLQQPVQPQQPYYAPAAEQPAQQPYYAPAPEQPVAGNAWQAEEQQSTFAPQSTYQTEQTYQQPAAQEPLYQQPQPVEQQPVVEPEPVVEETKPARPPLYYFEEVEEKRAREREQLAAWYQPIPEPVKEPEPIKSSLKAPSVAAVPPVEAAAAVSPLASGVKKATLATGAAATVAAPVFSLANSGGPRPQVKEGIGPQLPRPKRIRVPTRRELASYGIKLPSQRAAEEKAREAQRNQYDSGDQYNDDEIDAMQQDELARQFAQTQQQRYGEQYQHDVPVNAEDADAAAEAELARQFAQTQQQRYSGEQPAGANPFSLDDFEFSPMKALLDDGPHEPLFTPIVEPVQQPQQPVAPQQQYQQPQQPVAPQPQYQQPQQQVAPQPQYQQPQQPVAPQQQYQQPQQPVAPQPQYQQPQQPVAPQPQYQQPQQPVAPQPQDTLLHPLLMRNGDSRPLHKPTTPLPSLDLLTPPPSEVEPVDTFALEQMARLVEARLADFRIKADVVNYSPGPVITRFELNLAPGVKAARISNLSRDLARSLSTVAVRVVEVIPGKPYVGLELPNKKRQTVYLREVLDNAKFRDNPSPLTVVLGKDIAGEPVVADLAKMPHLLVAGTTGSGKSVGVNAMILSMLYKAQPEDVRFIMIDPKMLELSVYEGIPHLLTEVVTDMKDAANALRWCVNEMERRYKLMSALGVRNLAGYNEKIAEADRMMRPIPDPYWKPGDSMDAQHPVLKKEPYIVVLVDEFADLMMTVGKKVEELIARLAQKARAAGIHLVLATQRPSVDVITGLIKANIPTRIAFTVSSKIDSRTILDQAGAESLLGMGDMLYSGPNSTLPVRVHGAFVRDQEVHAVVQDWKARGRPQYVDXITSDSESEGGAGGFDGAEELDPLFDQAVQFVTEKRKASISGVQRQFRIGYNRAARIIEQMEAQGIVSEQGHNGNREVLSPPPFD

SEQ ID NO: 12552 - protein, 432 aa, Dechloromonas aromatica RCB
MSTREQQIAALEKDWAENPRWKGIKRGYSAADVVRLRGSFQVEHTLARRGAEKLWDLVNNTPYVNCLGALTGGQAVQQAKAGIKAIYLSGWQVAADNNEYAAMYPDQSLYPVDSVPKVVERINNSFNRADEIQWSKNINAGDAGHVEYHLPIVADAEAGFGGVLNAYELMKAMIRAGAAGVHWEDQLASVKKCGHMGGKVLVPTTEAVQKLIAARMAADVYGVPTLVIARTDAEAADLLTSDYDENDKPFLTGERTAEGFYKTRKGLDQAISRAIAYADYADLVWCETGTPDLEYARKFAEAVHKVHPGKMLAYNCSPSFNWKKNLDDATIAKFQKELGAMGYKYQFITLAGIHSMWYNMFDLAQDYAARGMSAYVEKVQEPEFAARDRGYTFVSHQQEVGTGYFDDVTTVIQGGKSSVTALTGSTEEEQFH

SEQ ID NO: 12553 - protein, 449 aa, Glycine max
  misc_feature (21)..(21): Xaa can be any naturally occurring amino acid
SSRACQKYGSIFKRPQGLFIXLKEKGKILEVLKNWPEKSIQVIVVTDGERILGLGDLGCQGMGIPVGKLALYTALGGVRPSACLPITIDVGTNNEKLLNDEFYIGLRQKRATGQEYSELLHEFMTAVKQNYGEKVLVQFEDFANHNAFELLAKYGTTHLVFNDDIQGTASVVLAGVVAALKLIGGTLADHTFLFLGAGEAGTGIAELIALEMSKQTKTPIEETRKKIWLVDSKGLIVGSRKASLQHFKQPWAHEHEPVGSLLEAVKVIKPTVLIGSSGVGKTFTKEVIEAVTSINEKPLVLALSNPTSQSECTAEEAYQWSEGRAIFASGSPFDPVEYKGKVYYSGQANNAYIFPGFGLGLVISGAIRVHDDMLLAASEALAKLVSNENYEKGLIYPPFSNIREISANIAASVAGKAYELGLATRLPRPQNLVKYAESCMYSPVYRNYR

SEQ ID NO: 12554 - protein, 343 aa, Burkholderia fungorum LB400
MKALAKLERAPGLTLTDVKKPEVGHNDVMIRITRTAICGTDIHIWKWDDWAQKTIPVPMHVGHEYVGEIVEMGQEVRGFAIGDRVSGEGHITCGFCRNCRAGRRHLCRNTVGVGVNREGAFAEYLVIPAFNAFKIPPEISDDLAAIFDPFGNATHTALSFNLVGEDVLITGAGPIGIMAVAIAKHVGARNVVITDVNDYRLELARKMGATRAVNVSRESLRDVMADLHMAEGFDVGLEMSGVPSAFTGMLEAMNHGGKIALLGIPPAQTAIDWTQVIFKGLEIKGIYGREMFETWYKMVAMLQSGLDLSPILTHHFKVDDYREAFATMLSGESGKVILDWTAA

SEQ ID NO: 12555 - protein, 319 aa, Thermotoga maritima MSB8
MKKIAVLTSGGDAPGMNAAVRAVVRYGVRQGLEVIGVRRGYSGLIDGDFVKLEYKDVAGITEKGGTILRTSRCEEFKTEEGRELAAKQIKKHGIEGLVVIGGEGSLTGAHLLYEEHKIPVVGIPATIDNDIGLTDMCIGVDTCLNTVMDAVQKLKDTASSHERAFIVEVMGRHSGYIALMAGLVTGAEAIIVPEIPVDYSQLADRILEERRRGKINSIIIVAEGAASAYTVARHLEYRIGYETRITILGHVQRGGSPTAFDRRLALSMGVEAVDALLDGEVDVMIALQGNKFVRVPIMEALSTKKTIDKKLYEIAHMLS

SEQ ID NO: 12556 - protein, 341 aa, Glycine max
IRLERLEQRLTKCQPFDAPEPNQLIWPNLKIKYFQRELRQYLVYFIVALTIFFYMIPITFISAFTTLDNLVKYLPFIKPIVNIKALRTVLEAYLPQLALIIFLALLPKLLLFLSKFEGIPTESHAVRAASGKYFYFTVLNVFIGVTIGGTLFKAFKRIREHPTLDEISSLLAESLPGNATFFLTYVALKFFIGYGLELSRIVPLIIYHLKRKYLCKTEAELKEAWRPGDLGYGTRVPGDMLIVTIVFCYSVIAPVIIPFGALYFGLGWLVLRNQALKVYVPTFESYGRMWPHIHNRILASLILYQITMFGYFGTQKFYYTPLVLPLPILSLIFGFVCAKKF

SEQ ID NO: 12557 - protein, 454 aa, Populus sieboldii x Populus grandidentata
DLNHRNLTDLAKKFGDILLLRMGQRNLVVVSSPDLAKEVLHTQGVEFGSRTRNVVFDIFTGKGQDMVFTVYGEHWRKMRRIMTVPFFTNKVVQQYRHGWEEEAAQVVEDVKKNPEAATHGIVLRRRLQLMMYNNMYRIMFDRRFESEEDPLFNKLKALNGERSRLAQSFDYNYGDFIPILRPFLRGYLKICKEVKERRLQLFKDYFVEERKKLGSTKSMSNEGLKCAIDHILDAQKKGEINEDNVLYIVENINVAAIETTLWSIEWGIAELVNHPEIQKKLRDELDTVLGPGHQITEPDTYKLPYLNAVIKETLRLRMAIPLLVPHMNLHDAKLGGFDIPAESKILVNAWWLANNPAKWKNPEEFRPERFFEEEAKVEANGNDFRYLPFGVGRRSCPGIILALPILGITLGRLVQNFELLPPPGQSKIDTSEKGGQFSLHILKHSTIVAKPRSF

SEQ ID NO: 12558 - protein, 372 aa, Bacillus methanolicus
MTVTRGLEGVVATTSSISSIIDDTLTYVGYNIDDLADNASFEEVIFLLWHRKLPTKSELEELKILLAENAELPKEILDHFKMYPIDKVHPMAALRSAVSLLGLYDEEADLMDEEANYRKAIRLQAKIPSIVAAFARVRKGLEPVAPRKDLSFAANFLYMLKGKEPEDIAVEAFNKVLVLHADHELNASTFTARVCVATLSDIYSGVTAAIGALKGPLHGGANEAVMKMLTEIGSLENVEPYIREKLAKKEKIMGFGHRVYRKGDPRAKHLREMSKKLTELTGEPHWYEMSTKIEAIVTGEKGLPPNVDFYSASIYHSLGIDHDLFTPIFAVSRISGWLAHILEQYENNRLIRPRADYIGPGMQKFIPIEQRG

SEQ ID NO: 12559 - protein, 66 aa, Glycine max
ICYTENQVNGEIYNHEELRKQLPNHTFRTGSDCDVIAHLYEEHGENFVDMLDGIFSFVLLDTRDNS

SEQ ID NO: 12560 - protein, 168 aa, Avena sterilis subsp. ludoviciana
VMASSATSVAPFQGLKSTAGLPVSRRSNAGLGSVSNGGRIRCMQVWPIEGIKKFETLSYLPPLTEEALLKQIDFLIRSKWVPCLEFSQGGFIFREHGSTPGYYDGRYWTMWKLPMFGCTDASQVIKEVEEVKKEYPDAYVRIIGFDNIRQVQCVSFIAFKPPGCEESG

SEQ ID NO: 12561 - protein, 358 aa, Gibberella zeae PH-1
MASATRQFARAATRATRNGFAIAPRQVIRQQGRRYYSSEPAQKSSSAWIWLTGAAVAGGAGYYFYGNSASSATAKVFNPSKEDYQKVYNEIAARLEEKDDYDDGSYGPVLVRLAWHASGTYDKETGTGGSNGATMRFAPESDHGANAGLAAARDFLQPVKEKFPWITYSDLWILAGVCAIQEMLGPAIPYRPGRSDRDVSGCTPDGRLPDASKRQDHLRGIFGRMGFNDQEIVALSGAHALGRCHTDRSGYSGPWTFSPTVLTNDYFRLLVEEKWQWKKWNGPAQYEDKSTKSLMMLPSDIALIEDKKFKPWVEKYAKDNDAFFKDFSNVVLRLFELGVPFAQGTENQRWTFKPTHQE

SEQ ID NO: 12562 - protein, 261 aa, Nicotiana tabacum
MEAANHNNDNGCTNESPYISSVLPGWFSEISPLWPGEAHSLKVEKILFQGKSDYQNVMVFQSSTYGKVLVLDGVIQLTERDECAYQEMIAHLPLCSIPNPKKVLVIGGGDGGVLREVSRHSSVEQIDICEIDKMVVEVSKQFFPDVAVGYEDPRVNLHIGDGVAFLKNVAAGTYDAVIVDSSDPIGPAQELFEKPFFDSIARALHPGGVVSTQAESIWLHMHIIEEIVANCRQIFKGSVNYAWTTVPTYPSGMIGFMLCST

SEQ ID NO: 12563 - protein, 492 aa, Gibberella zeae PH-1
MHFNTLTCVLVGLVAHTSAVPTKREAVNSCLTQAKVPTDAQGSQSWKEDGTAYNLRLPFEPAAIAVPTTVAQVSAAVECGAKHGVAISAKSGGHSYTSLGFGGEDGHLMIELDRMYSVKLAKDGTAKIQPGARLGHVATELWNQGKRALAHGTCPGVGLGGHALHGGYGMVARKHGLTLDLMIGATVVLPTGKVVHCSKTENSDLFWGIRGAGANFGVVVELEFQTFAAPEKITYFDIGLNWDQNTAPQGLYDFQEFGKGMPAEITMQMGVSKNGYSVDGAYIGDEASLRKALQPLVQKFGGVQVTATTVDWMGLVTHFAGAGVNVNPTSASYDAHDNFYASSLAAPALTLAEFKSFVNFVSTTGKSSSHSWWLQMDITGGTYSAVSKPKPSDTAYVHRDTLLLFQFYDSVAATAQYPSDGFNLIKGLRQSISSSLKAGTWGMYANYPDSQIKNDRATEMYWGSNVAKLEAVKAKYDPKNLFRNPQSIKPKA

SEQ ID NO: 12564 - protein, 154 aa, Rubrivivax gelatinosus PM1
MASGRRFVAAALLAGLLAGPAVAKDAPPLAEDPVLEARVMRIAAELRCLVCQNQTIADSHADLAVDLRRQVRSMLSEGRSQAEILQYMTDRYGDFVLYRPPVRTSTWLLWFGPFVLLVGGLVTLLLVLRRRARLSDDHFEPDEDDADGAGPRAP

SEQ ID NO: 12565 - protein, 168 aa, Triticum aestivum
  misc_feature (110)..(110): Xaa can be any naturally occurring amino acid
  misc_feature (114)..(114): Xaa can be any naturally occurring amino acid
  misc_feature (125)..(125): Xaa can be any naturally occurring amino acid
  misc_feature (132)..(132): Xaa can be any naturally occurring amino acid
  misc_feature (136)..(136): Xaa can be any naturally occurring amino acid
MAPTVMASSATSVAPFQGLKSTAGLPVSRRSNGASLGSVSNGGRIRCMQVWPIEGIKKFETLSYLPPLSTEALLKQVDYLIRSKWVPCLEFSKVGFIFREHNASPGYYDXRYWXTMWKLPMFGCXDATQVIXQVEXVKKEYLTRIPHHRIHNMRKMRQLAKPAQDPEG

SEQ ID NO: 12566 - protein, 269 aa, Corynebacterium glutamicum ATCC 13032
MTLSLPPIGFGTVHLDGAPGVEAIATAIDAGYRLIDTAYNYENEGTVGKAVRESGVPREELIVTSKLPGRFHARDLGRVRIEESLYRLNLDYIDLLLIHWPNPSKDLYVEAWETLIEVRDAGLVKHIGVSNFLPNHIDRLRRETGELPAVNQIELHPYFPQVEQVDFHDELGIITEAWSPLSNGRGLVEEPLLKEIGERYGVGSGEIALAWHHARGIVPIPRSTNPARQRSNLEAVKISLIDEDVQAITALARKNGRIKDQDPAVYEEF

SEQ ID NO: 12567 - protein, 122 aa, Euglena longa
MIQTQTYLNVSDNSGAKKIMCISIISTKRKYAKIGDTIIAVVKKASPNKIIKKSMIVKALIIRTTKPLYRKHNNMYISFNENAAIIINTDNTLKGTNIFGPVPRELMNIGFTNLNSTAKLII

SEQ ID NO: 12568 - protein, 343 aa, Thermus thermophilus HB27
MRALAKLAPEEGLTLVDRPVPEPGPGEILVRVEAASICGTDLHIWKWDAWARGRIRPPLVTGHEFSGVVEAVGPGVKRPQVGDHVSLESHVVCHACPACRTGNYHVCLNTKILGVDRDGGFAEYVVVPAENAWVNPKDLPFEVAAILEPFGNAVHTVYAGSGVSGKSVLITGAGPIGLMAAMVARASGAGPILVSDPNPYRLAFARPYADRLVNPLEEDLLEVVRRVTGSGVEVLLEFSGNEAAIHQGLMALIPGGEARILGIPSDPIRFDLAGELVMRGITAFGIAGRRLWQTWMQGTALVYSGRVDLSPLITHRLPLSRYREAFGLLASGQAVKVILDPKA

SEQ ID NO: 12569 - protein, 142 aa, Glycine max
MVLESTMICIDNSEWMRNGDYSPSRFQAQADAVNLICGAKTQSNPENTVGVMTMAGKGVRVLVTPTSDLGKILACMHGLEVGAEANLAAAIQVAQLALKHRQNKRQQQRIIVFIGSPVTYDKKVLETIGKKLKKNNVALDVV

SEQ ID NO: 12570 - protein, 352 aa, Triticum aestivum
  misc_feature (192)..(192): Xaa can be any naturally occurring amino acid
  misc_feature (306)..(306): Xaa can be any naturally occurring amino acid
MAASKQWTRVRTLGRGASGAEVFLAADDASGELFAVKSATAACASALKREEGLMACLHSPCVVSCLGGRSARDGSYHLFLEFAPGGSLADRVASNGGLDERAVRGYAADVAAGLAYLHGAGMVHGDVKARNVVIGADGRAKLADFGCSRKAGADVPIIGGTPAFMAPEVARGEEQGPAADVWALGCTVVEMXTGRAPWSGMDGHALAALHRIGYTEAVPELPQWLSAEARDFLGGCLVRQASDRCTAAQLLEHPFLASAGGHAKPKATESSWCRPRHPEGGFWESESKPGRGSTKPGPKRNKALAXPASGLPEVDPKGGWMGLLSGPTGAPKQGPVRPRSHRIYAGEVFKGK

SEQ ID NO: 12571 - protein, 229 aa, Triticum aestivum
  misc_feature (217)..(217): Xaa can be any naturally occurring amino acid
MGTMAPSPALLPVLLLLPLLLLSVVCTAGAAPAATATVPTIPSQPGKPNSNNKQKQGGAPLGPAVRALVQSTCNATTYYDLCVAALVADPASSTADLRGLCAIAVSAAAANASATASALANTTWAASGAPEPGSDGRAQQVPALLTRTCAGKYGEAREALLEARESVGEEAYDYAFVHVGAAAEYPAVCRTMFRRKRVPYPVELAGGRRRWRPLNRXIDSHAPAYLYKD

SEQ ID NO: 12572 - protein, 296 aa, Escherichia coli O157:H7 EDL933
MSFDLIIKNGTVILENEARVVDIAVKGGKIAAIGQDLGDAKEVMDASGLVVSPGMVDAHTHISEPGRSHWEGYETGTRAAAKGGITTMIEMPLNQLPATVDRASIELKFDAAKGKLTIDAAQLGGLVSYNIDRLHELDEVGVVGFKCFVATCGDRGIDNDFRDVNDWQFFKGAQKLGELGQPVLVHCENALICDALGEEAKREGRVTAHDYVASRPVFTEVEAIRRVLYLAKVAGCRLHVCHISSPEGVEEVTRARQEGQDVTCESCPHYFVLDTDQFEEIGTLAKCSPPIRDLEN

SEQ ID NO: 12573 - protein, 302 aa, Zea mays
MAGMSLQHPWAFAFGLLGNVISFMTFLAPIPTFYRIYKSKSTEGFQSVPYVVALFSAMLWIFYALIKSNETFLITINAAGCVIETIYVVMYFVYAPKKAKLFTAKIMVLLNGGVFGVILLLTLLLFKGSKRVVLLGWICVGFSVSVFVAPLSIMRRVIQTKSVEYMPFSLSLSLTLSAVVWFLYGLLIKDKYVALPNILGFTFGVVQMVLYVLYMNKTPVAATAEGKDAGKLSSAADEHVLVNIAKLSPALPERSSGVHPVTQMAGVPVRSCAAEATAPAMLPNRDVVDVFVSRHSPAVHVA

SEQ ID NO: 12574 - protein, 103 aa, Zea mays
MHGRTAMAVACLLCMTALLLVQDVQSRRLLWTEQEKKQTHGGLVGNHGAADRRSTSLEPCSGAMGGGGTGSADKQGEFPCDDDTSKWTELHTDYIYTQDFKHP

SEQ ID NO: 12575 - protein, 485 aa, Agrobacterium tumefaciens str. C58
MQNKVQFITYVDRLTRGGFRQLKELVDGKFAGLFGGVHVLPFFNPIDGADAGFDPTDHTIVDPRLGDWEDVRALSGSVEIMADLIVNHVSSQSGAFTDFIAKGSASEFADMFMTFDKVFPDGATEEDLLRIYRPRPGLPFSKVTLADGTQRMLWTTFTPEQIDIDVHSAKGTTYLETILDRFSEANVTAIRLDAAGYAIKKAGSSCFMIDDTYAFLEEVAGKARNRGMEVLVEIHSYHRDQIEIAKKVDRVYDFALPPLILHALFTGDATPLAKWLAISPRNAITVLDTHDGIGVIDVGAHSDGRAGLLEPQAIDNLVGEIHRRSDGQSRQATGAAASNLDLYQVNCTYYDALGRNDNDYLIARAIQFFAPGIPQVYYVGLLGGVNDMDLLAKTGVGRDINRHYYGNDEIGTALETPLFHRLSNLIRFRNTHPAFGGALKATIADAGALVLSWQHGDAFAELKISFADRKASIAASGQSEMQIVE

SEQ ID NO: 12576 - protein, 291 aa, Glycine max
  misc_feature (27)..(27): Xaa can be any naturally occurring amino acid
  misc_feature (49)..(49): Xaa can be any naturally occurring amino acid
  misc_feature (78)..(78): Xaa can be any naturally occurring amino acid
  misc_feature (84)..(84): Xaa can be any naturally occurring amino acid
  misc_feature (90)..(90): Xaa can be any naturally occurring amino acid
  misc_feature (109)..(110): Xaa can be any naturally occurring amino acid
  misc_feature (118)..(118): Xaa can be any naturally occurring amino acid
  misc_feature (222)..(222): Xaa can be any naturally occurring amino acid
FSCWKAGKVQSIFFFWESKEVCNREDXRKLLPPDHVIRACQDLASKEYXEEVYAAYDKHKLETWDFPKATKFTGIEMXEEEAVXEQQRMXAEARARMNNGAAKPKEPAXXPQNQPQQXPPQLHLQVHLKAQQPPQPQPQLHHPQSQQPLHPQLQPYTQAPPQQPLHPQLQPYTQAPPQQPLQPPLQLYPQAQPEQPLQPQSSGSTTGTCVISTAAPSATGTXLLLQPPPQQSPQSQLQLHQQPQPMQVPLPPLPQPQPQPPELQQPQPLTQLQAEHGLNWTVSGSEHVASL

SEQ ID NO: 12577 - protein, 308 aa, Zea mays
PRASWPEVTPMTSLAAADLALQAGIPAGALNVVMGNAPEIGDALLQSTQVRKITFTGSTAVGKKLMAESANTVKKVSLELGGNAPCIVFDDADIDVAVKGSLAAKFRNSGQTCVCANRILVQEGIYEKFASAFIKAVQSLKVGNGLEESTSQGPLINEAAVQKVEKFINDATSKGANVMLGGKRHSLGMSFYEPTVVGNVSNDMLLFREEVFGPVAPLIPFKTEEEAVHMANDTNAGLAAYIFTKSIPRSWRVSESLEYGLVGVNEGIISTEVAPFGGVKQSGLGREGSKYGVDEYLELKYICMGNLG

SEQ ID NO: 12578 - protein, 136 aa, Arabidopsis thaliana
MASSMLSSATMVASPAQATMVAPFNGLKSSAAFPATRKANNDITSITSNGGRVNCMQVWPPIGKKKFETLSYLPDLTDSELAKEVDYLIRNKWIPCVEFDTDLCTVSTVTHPDTMMDGTGQCGSFPCSVAPTPLKC

SEQ ID NO: 12579 - protein, 402 aa, Oryza sativa
MVLEATMICIDNSEWMRNGDYSPSRFQAQADAVNLICGAKTQSNPENTVGVMTMAGKGVRVLVTPTSDLGKILACMHGLEVGAEANLAAAIQVAQLALKHRQNKRQQQRIIAFIGSPVKYDKKVLETIGKKLKKNNVALDIVDFGETDDDKPEKLEALISAVNSSDSSHIVHVPPGENALSDVLISTPIFTGEEGGSGFAASAAAAAATGAAGFEFDVDPNVDPELALALRLSMEEERARQEAIAKKAAEESSGAENKDHASSSNADSVMAEAEPASNAADDKKDQPKEDDDAQLLQQALAMSMEEGSSGAAAADAAMAEAAVDDQDLALALQMSVQDAGGSSQSDMSKVFEDRSFVTSILNSLPGVDPNDPSVKDLLASLHGQGEQEKKEDKSDKPEDEKK

SEQ ID NO: 12580 - protein, 408 aa, Shewanella oneidensis MR-1
MTVSELRFALDTFYFLISGALVMWMAAGFAMLEAGLVRSKNTTEILTKNVVLYAIACVMYLLVGYNIMYVDNAEGGWLPSFGTLIGSQAADANHALESDFFFQVVFVATAMSIVSGAVAERMKLWAFLVFSVVMTGIIYPVEGYWTWGKGFIASLGFVDFAGSGIVHMTGAAAAIAGVLLLGARKGKYGPNGQVNPIPGSNLPMATLGMFILWMGWFGFNGGSQLMVSDAANASAVAKVFVNTNTAAALGAISALIVCKMIWGKADLTMILNGILAGLVAITADPLSPSLLMAGVIGLVAGGLVVFSIVGLDRIKIDDPVGAISVHGVAGFLGLMCVPLSNANATITAQLTGAAIIFAWVFSASFAVWFVLKMTMGIRVSEEEEYNGMDASDCGIDAYPEFVTVKSAG

SEQ ID NO: 12581 - DNA, 844 bp, Oryza sativa
ctcgaggtcattcatatgcttgagaagagagtcgggatagtccaaaataaaacaaaggtaagattacctggtcaaaagtgaaaacatcagttaaaaggtggtataaagtaaaatatcggtaataaaaggtggcccaaagtgaaatttactcttttctactattataaaaattgaggatgtttttgtcggtactttgatacgtcatttttgtatgaattggtttttaagtttattcgcttttggaaatgcatatctgtatttgagtcgggttttaagttcgtttgcttttgtaaatacagagggatttgtataagaaatatctttaaaaaaacccatatgctaatttgacataatttttgagaaaaatatatattcaggcgaattctcacaatgaacaataataagattaaaatagctttcccccgttgcagcgcatgggtattttttctagtaaaaataaaagataaacttagactcaaaacatttacaaaaacaacccctaaagttcctaaagcccaaagtgctatccacgatccatagcaagcccagcccaacccaacccaacccaacccaccccagtccagccaactggacaatagtctccacacccccccactatcaccgtgagttgtccgcacgcaccgcacgtctcgcagccaaaaaaaaaaaaagaaagaaaaaaaagaaaaagaaaaaacagcaggtgggtccgggtcgtgggggccggaaacgcgaggaggatcgcgagccagcgacgaggccggccctccctccgcttccaaagaaacgccccccatcgccactatatacatacccccccctctcctcccatccccccaaccct

SEQ ID NO: 12582 - DNA, 838 bp, Hordeum vulgare
catcgattttaaaaaaaagttcatacctttcaaaaacgttcatcaatttttttaaaaagttcactaaaaatgaaaaaaagttcatccaatttaaaaaaagttcattaattttttataaatttcaataaatttgaaaaaacttcataaaattcaacaaaagttcattgaagtgaaaaaagctcataaatctttaaaaagtgcatccattttcaaaaagatgttcatcaaaattcaatatagttcaccaatattcaaaaaagttcattaatcttaaaaaatattcgctaaaatttaaaaaatgtttatcaatatttaaacggcgtctagatgagccggtctatttacaaacaccataggcgccaattaacaaaaatgcacgttagatcacgtctacggcgtcaaataggaaatgcccatcggccttactattaagagttgttttggttatcctttaggatttatgctgtgggctggacttaacacaaaacccacagccatggtaggccggaatctattattcagctcacaaacgatgttctactcaaaagaagaaaaaaatctgttgtcagaaaaagagaacaaaaaaggctcacgaacatgccgcggctcgcacaggtggccgtgagcttctgaatgacttggccacccggcatgtccactgcccccctagacggtgtgggtgggtggacaggtcaagcgcattgaacaaggtcaccctgcgttctgccacgaggccaactgcgtggccctcatgcaacgcgccttgctgccacttctacacacgccctcgccggccgaccgctgctataaaagcagctccccgttgcgtcctcgacgg

SEQ ID NO: 12583 - DNA, 828 bp, Glycine max
ggcaaaaacatttaatacgtattatttaagaaaaaaatatgtaataatatatttatattttaatatctattcttatgtattttttaaaaatctattatatattgatcaactaaaatatttttatatctacacttattttgcatttttatcaattttcttgcgttttttggcatatttaataatgactattctttaataatcaatcattattcttacatggtacatattgttggaaccatatgaagtgtccattgcatttgactatgtggatagtgttttgatccaggcctccatttgccgcttattaattaatttggtaacagtccgtactaatcagttacttatccttcctccatcataattaatcttggtagtctcgaatgccacaacactgactagtctcttggatcataagaaaaagccaaggaacaaaagaagacaaaacacaatgagagtatcctttgcatagcaatgtctaagttcataaaattcaaacaaaaacgcaatcacacacagtggacatcacttatccactagctgatcaggatcgccgcgtcaagaaaaaaaaactggaccccaaaagccatgcacaacaacacgtactcacaaaggtgtcaatcgagcagcccaaaacattcaccaactcaacccatcatgagcccacacatttgttgtttctaacccaacctcaaactcgtattctcttccgccacctcatttttgtttatttcaacacccgtcaaactgcatgccaccccgtggccaaatgtccatgcatgttaacaagacctatgactataaatatctgcaatctcggcccaggttttc

SEQ ID NO: 12584 - DNA, 523 bp, Zea mays
atcggaatattagcatgtcaacttgcactctctaaggctcctttggaaagcaggattttagaaaaaaaaatcatataaattttttacatgaatcagtttattttcggattatgaaatattttctcataacagtataacacatattttgtatataagttattatgttattatatataaccgttgcaacgtacgggcattcacctagtaaagaaagaagattaattattctctggtggagattgtgcccgagcccgaaggtcatgatatggacgttgcaaacccacttcacgaggggacaaaaaagaaatagggttaccactttcatcagttaaagggcgtgacatggacgtgttgaagatccggcacattccctgcgaaatatacacgtcatggtactaacgaggcatgaaactggccacatggccatggacgcgtgaagcgtgccatgcattggacatgcggcatccgaacttctgaagatcatatcagagagacactgatgtacgaactgccgtaacattct

SEQ ID NO: 12585 - DNA, 786 bp, Zea mays
gacatggaggtggaaggcctgacgtagatagagaagatgctcttagctttcattgtctttcttttgtagtcatctgatttacctctctcgtttatacaactggttttttaaacactccttaacttttcaaattgtctctttctttaccctagactagataattttaatggtgattttgctaatgtggcgccatgttagatagaggtaaaatgaactagttaaaagctcagagtgataaatcaggctctcaaaaattcataaactgttttttaaatatccaaatatttttacatggaaaataataaaatttagtttagtattaaaaaattcagttgaatatagttttgtcttcaaaaattatgaaactgatcttaattatttttccttaaaaccgtgctctatctttgatgtctagtttgagacgattatataattttttttgtgcttaactacgacgagctgaagtacgtagaaatactagtggagtcgtgccgcgtgtgcctgtagccactcgtacgctacagcccaagcgctagagcccaagaggccggaggtggaaggcgtcgcggcactatagccactcgccgcaagagcccaagagaccggagctggaaggatgagggtctgggtgttcacgaattgcctggaggcaggaggctcgtcgtccggagccacaggcgtggagacgtccgggataaggtgagcagccgctgcgataggggcgcgtgtgaaccccgtcgcgccccacggatggtataagaataaaggcattccgcgtgcaggatc

SEQ ID NO: 12586 - DNA, 1832 bp, Oryza sativa
cctctgttttgtttttcaccctcaatatttggaaacatttatctaggttgtttgtgtccaggcctataaatcatacatgatgttgtcgtattggatgtgaatgtggtggcgtgttcagtgccttggatttgagtttgatgagagttgcttctgggtcaccactcaccattatcgatgctcctcttcagcataaggtaaaagtcttccctgtttacgttattttacccactatggttgcttgggttggttttttcctgattgcttatgccatggaaagtcatttgatatgttgaacttgaattaactgtagaattgtatacatgttccatttgtgttgtacttccttcttttctattagtagcctcagatgagtgtgaaaaaaacagattatataacttgccctataaatcatttgaaaaaaatattgtacagtgagaaattgatatatagtgaatttttaagagcatgttttcctaaagaagtatatattttctatgtacaaaggccattgaagtaattgtagatacaggataatgtagactttttggacttacactgctacctttaagtaacaatcatgagcaatagtgttgcaatgatatttaggctgcattcgtttactctcttgatttccatgagcacgcttcccaaactgttaaactctgtgttttttgccaaaaaaaaatgtataggaaagttgcttttaaaaaatcatatcaatccattttttaagttatagctaatacttaattaatcatgcgctaataagtcactctgtttttcgtactagagagattgttttgaaccagcactcaagaacacagccttaacccagccaaataatgctacaacctaccagtccacacctcttgtaaagcatttgttgcatggaaaagctaagatgacagcaacctgttcaggaaaacaactgacaaggtcatagggagagggagcttttggaaaggtgccgtgcagttcaaacaattagttagcagtagggtgttggtttttgctcacagcaataagaagttaatcatggtgtaggcaacccaaataaaacaccaaaatatgcacaaggcagtttgttgtattctgtagtacagacaaaactaaaagtaatgaaagaagatgtggtgttagaaaaggaaacaatatcatgagtaatgtgtgagcattatgggaccacgaaataaaaagaacattttgatgagtcgtgtatcctcgatgagcctcaaaagttctctcaccccggataagaaacccttaagcaatgtgcaaagtttgcattctccactgacataatgcaaaataagatatcatcgatgacatagcaactcatgcatcatatcatgcctctctcaacctattcattcctactcatctacataagtatcttcagctaaatgttagaacataaacccataagtcacgtttgatgagtattaggcgtgacacatgacaaatcacagactcaagcaagataaagcaaaatgatgtgtacataaaactccagagctatatgtcatattgcaaaaagaggagagcttataagacaaggcatgactcacaaaaattcatttgcctttcgtgtcaaaaagaggagggctttacattatccatgtcatattgcaaaagaaagagagaaagaacaacacaatgctgcgtcaattatacatatctgtatgtccatcattattcatccacctttcgtgtaccacacttcatatatcatgagtcacttcatgtctggacattaacaaactctatcttaacatttagatgcaagagcctttatctcactataaatgcacgatgatttctcattgtttctc

SEQ ID NO: 12587 - DNA, 786 bp, Zea mays
gacatggaggtggaaggcctgacgtagatagagaagatgctcttagctttcattgtctttcttttgtagtcatctgatttacctctctcgtttatacaactggttttttaaacactccttaacttttcaaattgtctctttctttaccctagactagataattttaatggtgattttgctaatgtggcgccatgttagatagaggtaaaatgaactagttaaaagctcagagtgataaatcaggctctcaaaaattcataaactgttttttaaatatccaaatatttttacatggaaaataataaaatttagtttagtattaaaaaattcagttgaatatagttttgtcttcaaaaattatgaaactgatcttaattatttttccttaaaaccgtgctctatctttgatgtctagtttgagacgattatataattttttttgtgcttaactacgacgagctgaagtacgtagaaatactagtggagtcgtgccgcgtgtgcctgtagccactcgtacgctacagcccaagcgctagagcccaagaggccggaggtggaaggcgtcgcggcactatagccactcgccgcaagagcccaagagaccggagctggaaggatgagggtctgggtgttcacgaattgcctggaggcaggaggctcgtcgtccggagccacaggcgtggagacgtccgggataaggtgagcagccgctgcgataggggcgcgtgtgaaccccgtcgcgccccacggatggtataagaataaaggcattccgcgtgcaggatt

SEQ ID NO: 12588 - DNA, 165 bp, Zea mays
cacccgttcgcctctcaccttttcgctgtactcactcgccacacacaccccctctccagctccgttggagctccggacagcagcaggcgcggggcggtcacgtagtaagcagctctcggctccctctccccttgctccatatgatcgtcgaacccatcgagctac

SEQ ID NO: 12589 - DNA, 1039 bp, Zea mays
gtcccgcgtcaatattattaaaaaactcctacatttctttataatcaacccgcactcttataatctcttctctactactataataagagagtttatgtacaaaataaggtgaaattatgtataagtgttctggatattggttgttggctccatattcacacaacctaatcaatagaaaacatatgttttattaaaacaaaatttatcatatatcatatatatatatatacatatatatatatatatataaaccgtagcaatgcacgggcatataactagtgcaacttaatacatgtgtgtattaagatgaataagagggtatccaaataaaaaacttgttcgcttacgtctggatcgaaaggggttggaaacgattaaatctcttcctagtcaaaattgaatagaaggagatttaatctctcccaatccccttcgatcatccaggtgcaaccgtataagtcctaaagtggtgaggaacacgaaacaaccatgcattggcatgtaaagctccaagaatttgttgtatccttaacaactcacagaacatcaaccaaaattgcacgtcaagggtattgggtaagaaacaatcaaacaaatcctctctgtgtgcaaagaaacacggtgagtcatgccgagatcatactcatctgatatacatgcttacagctcacaagacattacaaacaactcatattgcattacaaagatcgtttcatgaaaaataaaataggccggacaggacaaaaatccttgacgtgtaaagtaaatttacaacaaaaaaaaagccatatgtcaagctaaatctaattcgttttacgtagatcaacaacctgtagaaggcaacaaaactgagccacgcagaagtacagaatgattccagatgaaccatcgacgtgctacgtaaagagagtgacgagtcatatacatttggcaagaaaccatgaagctgcctacagccgtctcggtggcataagaacacaagaaattgtgttaattaatcaaagctataaataacgctcgcatgcctgtgcacttctcc

SEQ ID NO: 12590 - DNA, 613 bp, Cauliflower mosaic virus
ggtccgatgtgagacttttcaacaaagggtaatatccggaaacctcctcggattccattgcccagctatctgtcactttattgtgaagatagtggaaaaggaaggtggctcctacaaatgccatcattgcgataaaggaaaggccatcgttgaagatgcctctgccgacagtggtcccaaagatggacccccacccacgaggagcatcgtggaaaaagaagacgttccaaccacgtcttcaaagcaagtggattgatgtgatggtccgattgagacttttcaacaaagggtaatatccggaaacctcctcggattccattgcccagctatctgtcactttattgtgaagatagtggaaaaggaaggtggctcctacaaatgccatcattgcgataaaggaaaggccatcgttgaagatgcctctgccgacagtggtcccaaagatggacccccacccacgaggagcatcgtggaaaaagaagacgttccaaccacgtcttcaaagcaagtggattgatgtgatatctccactgacgtaagggatgacgcacaatcccactatccttcgcaagacccttcctctatataaggaagttcatttcatttggagagg

SEQ ID NO: 12591 - DNA, 469 bp, Zea mays
ggtactcctgagatactataccctcctgttttaaaatagttggcattatcgaattatcattttactttttaatgttttctcttcttttaatatattttatgaattttaatgtattttaaaatgttatgcagttcgctctggacttttctgctgcgcctacacttgggtgtactgggcctaaattcagcctgaccgaccgcctgcattgaataatggatgagcaccggtaaaatccgcgtacccaactttcgagaagaaccgagacgtggcgggccgggccaccgacgcacggcaccagcgactgcacacgtcccgccggcgtacgtgtacgtgctgttccctcactggccgcccaatccactcatgcatgcccacgtacacccctgccgtggcgcgcccagatcctaatcctttcgccgttctgcacttctgctgcctataaatggcggcatcgaccgtcacctgcttc

SEQ ID NO: 12592 - DNA, 80 bp, Oryza sativa
accaccaccaccaccaccacctccacctcctcccccctcgctgccggacgacgagctcctcccccctccccctccgccgc

SEQ ID NO: 12593 - DNA, 65 bp, Hordeum vulgare subsp. vulgare
catccatcgagagacgttcgcagcagcaaagagcacgcagcaactagctttcagttgtttcaacc

SEQ ID NO: 12594 - DNA, 13 bp, Glycine max
atcatcaagaacc

SEQ ID NO: 12595 - DNA, 151 bp, Zea mays
attctatatataccctcagtccctgttccagttctcgttaagctagcagcaccaagttgtcgaacacttgcctgctcttgagctcgatcaagctatcatcagctgcgtcttgcgcacagcaacagcttcccaactgcaaccgtagcagcca

SEQ ID NO: 12596 - DNA, 477 bp, Oryza sativa
cgccgcgccggtaaccaccccgcccctctcctctttctttctccgttttttttttccgtctcggtctcgatctttggccttggtagtttgggtgggcgagaggcggcttcgtgcgcgcccagatcggtgcgcgggaggggcgggatctcgcggctggggctctcgccggcgtggatccggcccggatctcgcggggaatggggctctcggatgtagatctgcgatccgccgttgttgggggagatgatggggggtttaaaatttccgccatgctaaacaagatcaggaagaggggaaaagggcactatggtttatatttttatatatttctgctgcttcgtcaggcttagatgtgctagatctttctttcttctttttgtgggtagaatttgaatccctcagcattgttcatcggtagtttttcttttcatgatttgtgacaaatgcagcctcgtgcggagcttttttgtaggtaga

SEQ ID NO: 12597 - DNA, 804 bp, Zea mays
accgtcttcggtacgcgctcactccgccctctgcctttgttactgccacgtttctctgaatgctctcttgtgtggtgattgctgagagtggtttagctggatctagaattacactctgaaatcgtgttctgcctgtgctgattacttgccgtcctttgtagcagcaaaatatagggacatggtagtacgaaacgaagatagaacctacacagcaatacgagaaatgtgtaatttggtgcttagcggtatttatttaagcacatgttggtgttatagggcacttggattcagaagtttgctgttaatttaggcacaggcttcatactacatgggtcaatagtatagggattcatattataggcgatactataataatttgttcgtctgcagagcttattatttgccaaaattagatattcctattctgtttttgtttgtgtgctgttaaattgttaacgcctgaaggaataaatataaatgacgaaattttgatgtttatctctgctcctttattgtgaccataagtcaagatcagatgcacttgttttaaatattgttgtctgaagaaataagtactgacagtattttgatgcattgatctgcttgtttgttgtaacaaaatttaaaaataaagagtttcctttttgttgctctccttacctcctgatggtatctagtatctaccaactgacactatattgcttctctttacatacgtatcttgctcgatgccttctccctagtgttgaccagtgttactcacatagtctttgctcatttcattgtaatgcagataccaagcgg

SEQ ID NO: 12598 - DNA, 943 bp, Solanum tuberosum
accctgcaatgtgaccctagacttgtccatcttctggattggccaacttaattaatgtatgaaataaaaggatgcacacatagtgacatgctaatcactataatgtgggcatcaaagttgtgtgttatgtgtaattactaattatctgaataagagaaagagatcatccatatttcttatcctaaatgaatgtcacgtgtctttataattctttgatgaaccagatgcattttattaaccaattccatatacatataaatattaatcatatataattaatatcaattgggttagcaaaacaaatctagtctaggtgtgttttgctaattattgggggatagtgcaaaaagaaatctacgttctcaataattcagatagaaaacttaataaagtgagataatttacatagattgcttttatcctttgatatatgtgaaaccatgcatgatataaggaaaatagatagagaaataattttttacatcgttgaatatgtaaacaatttaattcaagaagctaggaatataaatattgaggagtttatgattattattattattttgatgttcaatgaagttttttttaatttcatatgaagtatacaaaaattcttcatagatttttgtttctatgccgtagttatctttaatatatttgtggttgaagaaatttattgctagaaacgaatggattgtcaatttttttttaaagcaaatatatatgaaattatactgtatattattttagtcatgattaaaatgtggccttaattgaatcatctttctcattcattttttcaaaagcatatcaggatgattgatatttatctattttaaaaattaatttaagggttcaaattaaatttaacttaaaagtgtcctaaccgtagttaaaggtttactttaaaaaaatactatgaaaaatctaatcttctatgaatcga

SEQ ID NO: 12599 - DNA, 315 bp, Gossypium hirsutum
tgatcacctgtcgtacagtatttctacatttgatgtgtgatttgtgaagaacatcaaacaaaacaagcactggctttaatatgatgataagtattatggtaattaattaattggcaaaaacaacaatgaagctaaaattttatttattgagccttgcggttaatttcttgtgatgatctttttttttattttctaattatatatagtttcctttgctttgaaatgctaaaggtttgagagagttatgctctttttttcttcctctttcttttttaactttatcatacaaattttgaataaaaatgtgagtacatt

SEQ ID NO: 12600 - DNA, 940 bp, Solanum tuberosum
accctgcaatgtgaccctagacttgtccatcttcggatggccaacttaattaatgtataaataaaaggatgcacacatagtgacatgctaatcactataatgtgggcatcaaagttgtgtgttatgtgtaattactaattatctgaataagagaaagagatcatccatatttcttatcctaaatgaatgtcacgtgtctttataattctttgatgaaccagatgcattttattaaccaattccatatacatataaatattaatcatatataattaatatcaattgggttagcaaaacaaatctagtctaggtgtgttttgctaattattgggggatagtgcaaaaagaaatctacgttctcaataattcagatagaaaacttaataaagtgagataatttacatagattgcttttatcctttgatatatgtgaaaccatgcatgatataaggaaaatagatagagaaataattttttacatcgttgaatatgtaaacaatttaattcaagaagctaggaatataaatattgaggagtttatgattattattattattttgatgttcaatgaagttttttttaatttcatatgaagtatacaaaaattcttcatagatttttgtttctatgccgtagttatctttaatatatttgtggttgaagaaatttattgctagaaacgaatggattgtcaatttttttttaaagcaaatatatatgaaattatactgtatattattttagtcatgattaaaatgtggccttaattgaatcatctttctcattcattttttcaaaagcatatcaggatgattgatatttatctattttaaaaattaatttaagggttcaaattaaatttaacttaaaagtgtcctaaccgtagttaaaggtttactttaaaaaaatactatgaaaaatctaatcttctatgaatcga

SEQ ID NO: 12601 - DNA, 61 bp, Zea mays
atcaccaccactgggtcttcagaccattagctttatctactccagagcgcagaagaacccg

SEQ ID NO: 12602 - DNA, 228 bp, Arabidopsis thaliana
atggcgcaagttagcagaatctgcaatggtgtgcagaacccatctcttatctccaatctctcgaaatccagtcaacgcaaatctcccttatcggtttctctgaagacgcagcagcatccacgagcttatccgatttcgtcgtcgtggggattgaagaagagtgggatgacgttaattggctctgagcttcgtcctcttaaggtcatgtcttctgtttccacggcgtgc

SEQ ID NO: 12603 - DNA, 10289 bp, synthetic DNA
cgcgccttaattaagcggccgcatcgatcgtgaagtttctcatctaagcccccatttggacgtgaatgtagacacgtcgaaataaagatttccgaattagaataatttgtttattgctttcgcctataaatacgacggatcgtaatttgtcgttttatcaaaatgtactttcattttataataacgctgcggacatctacatttttgaattgaaaaaaaattggtaattactctttctttttctccatattgaccatcatactcattgctgatccatgtagatttcccggacatgaagccatttacaattgaatatatcctgccgccgctgccgctttgcacccggtggagcttgcatgttggtttctacgcagaactgagccggttaggcagataatttccattgagaactgagccatgtgcaccttccccccaacacggtgagcgacggggcaacggagtgatccacatgggacttttcctagcttggctgccatttttggggtgaggccgttcgcggccgaggggcgcagcccctggggggatgggaggcccgcgttagcgggccgggagggttcgagaagggggggcaccccccttcggcgtgcgcggtcacgcgcacagggcgcagccctggttaaaaacaaggtttataaatattggtttaaaagcaggttaaaagacaggttagcggtggccgaaaaacgggcggaaacccttgcaaatgctggattttctgcctgtggacagcccctcaaatgtcaataggtgcgcccctcatctgtcagcactctgcccctcaagtgtcaaggatcgcgcccctcatctgtcagtagtcgcgcccctcaagtgtcaataccgcagggcacttatccccaggcttgtccacatcatctgtgggaaactcgcgtaaaatcaggcgttttcgccgatttgcgaggctggccagctccacgtcgccggccgaaatcgagcctgcccctcatctgtcaacgccgcgccgggtgagtcggcccctcaagtgtcaacgtccgcccctcatctgtcagtgagggccaagttttccgcgaggtatccacaacgccggcggccggccgcggtgtctcgcacacggcttcgacggcgtttctggcgcgtttgcagggccatagacggccgccagcccagcggcgagggcaaccagcccggtgagcgtcggaaagggtcgatcgaccgatgcccttgagagccttcaacccagtcagctccttccggtgggcgcggggcatgactatcgtcgccgcacttatgactgtcttctttatcatgcaactcgtaggacaggtgccggcagcgctctgggtcattttcggcgaggaccgctttcgctggagcgcgacgatgatcggcctgtcgcttgcggtattcggaatcttgcacgccctcgctcaagccttcgtcactggtcccgccaccaaacgtttcggcgagaagcaggccattatcgccggcatggcggccgacgcgctgggctacgtcttgctggcgttcgcgacgcgaggctggatggccttccccattatgattcttctcgcttccggcggcatcgggatgcccgcgttgcaggccatgctgtccaggcaggtagatgacgaccatcagggacagcttcaaggatcgctcgcggctcttaccagcctaacttcgatcattggaccgctgatcgtcacggcgatttatgccgcctcggcgagcacatggaacgggttggcatggattgtaggcgccgccctataccttgtctgcctccccgcgttgcgtcgcggtgcatggagccgggccacctcgacctgaatggaagccggcggcacctcgctaacggattcaccactccaagaattggagccaatcaattcttgcggagaactgtgaatgcgcaaaccaacccttggcagaacatatccatcgcgtccgccatctccagcagccgcacgcggcgcatctcgggcagcgttgggtcctggccacgggtgcgcatgatcgtgctcctgtcgttgaggacccggctaggctggcggggttgccttactggttagcagaatgaatcaccgatacgcgagcgaacgtgaagcgactgctgctgcaaaacgtctgcgacctgagcaacaacatgaatggtcttcggtttccgtgtttcgtaaagtctggaaacgcggaagtcagcgccctgcaccattatgttccggatctgcatcgcaggatgctgctggctaccctgtggaacacctacatctgtattaacgaagcgctggcattgaccctgagtgatttttctctggtcccgccgcatccataccgccagttgtttaccctcacaacgttccagtaaccgggcatgttcatcatcagtaacccgtatcgtgagcatcctctctcgtttcatcggtatcattacccccatgaacagaaatcccccttacacggaggcatcagtgaccaaacaggaaaaaaccgcccttaacatggcccgctttatcagaagccagacattaacgcttctggagaaactcaacgagctggacgcggatgaacaggcagacatctgtgaatcgcttcacgaccacgctgatgagctttaccgcagctgcctcgcgcgtttcggtgatgacggtgaaaacctctgacacatgcagctcccggagacggtcacagcttgtctgtaagcggatgccgggagcagacaagcccgtcagggcgcgtcagcgggtgttggcgggtgtcggggcgcagccatgacccagtcacgtagcgatagcggagtgtatactggcttaactatgcggcatcagagcagattgtactgagagtgcaccatatgcggtgtgaaataccgcacagatgcgtaaggagaaaataccgcatcaggcgctcttccgcttcctcgctcactgactcgctgcgctcggtcgttcggctgcggcgagcggtatcagctcactcaaaggcggtaatacggttatccacagaatcaggggataacgcaggaaagaacatgtgagcaaaaggccagcaaaaggccaggaaccgtaaaaaggccgcgttgctggcgtttttccataggctccgcccccctgacgagcatcacaaaaatcgacgctcaagtcagaggtggcgaaacccgacaggactataaagataccaggcgtttccccctggaagctccctcgtgcgctctcctgttccgaccctgccgcttaccggatacctgtccgcctttctcccttcgggaagcgtggcgctttctcatagctcacgctgtaggtatctcagttcggtgtaggtcgttcgctccaagctgggctgtgtgcacgaaccccccgttcagcccgaccgctgcgccttatccggtaactatcgtcttgagtccaacccggtaagacacgacttatcgccactggcagcagccactggtaacaggattagcagagcgaggtatgtaggcggtgctacagagttcttgaagtggtggcctaactacggctacactagaaggacagtatttggtatctgcgctctgctgaagccagttaccttcggaaaaagagttggtagctcttgatccggcaaacaaaccaccgctggtagcggtggtttttttgtttgcaagcagcagattacgcgcagaaaaaaaggatctcaagaagatcctttgatcttttctacggggtctgacgctcagtggaacgaaaactcacgttaagggattttggtcatgagattatcaaaaaggatcttcacctagatccttttaaattaaaaatgaagttttaaatcaatctaaagtatatatgagtaaacttggtctgacagttaccaatgcttaatcagtgaggcacctatctcagcgatctgtctatttcgttcatccatagttgcctgactccccgtcgtgtagataactacgatacgggagggcttaccatctggccccagtgctgcaatgataccgcgagacccacgctcaccggctccagatttatcagcaataaaccagccagccggaagggccgagcgcagaagtggtcctgcaactttatccgcctccatccagtctattaattgttgccgggaagctagagtaagtagttcgccagttaatagtttgcgcaacgttgttgccattgctgcaggtcgggagcacaggatgacgcctaacaattcattcaagccgacaccgcttcgcggcgcggcttaattcaggagttaaacatcatgagggaagcggtgatcgccgaagtatcgactcaactatcagaggtagttggcgtcatcgagcgccatctcgaaccgacgttgctggccgtacatttgtacggctccgcagtggatggcggcctgaagccacacagtgatattgatttgctggttacggtgaccgtaaggcttgatgaaacaacgcggcgagctttgatcaacgaccttttggaaacttcggcttcccctggagagagcgagattctccgcgctgtagaagtcaccattgttgtgcacgacgacatcattccgtggcgttatccagctaagcgcgaactgcaatttggagaatggcagcgcaatgacattcttgcaggtatcttcgagccagccacgatcgacattgatctggctatcttgctgacaaaagcaagagaacatagcgttgccttggtaggtccagcggcggaggaactctttgatccggttcctgaacaggatctatttgaggcgctaaatgaaaccttaacgctatggaactcgccgcccgactgggctggcgatgagcgaaatgtagtgcttacgttgtcccgcatttggtacagcgcagtaaccggcaaaatcgcgccgaaggatgtcgctgccgactgggcaatggagcgcctgccggcccagtatcagcccgtcatacttgaagctaggcaggcttatcttggacaagaagatcgcttggcctcgcgcgcagatcagttggaagaatttgttcactacgtgaaaggcgagatcaccaaggtagtcggcaaataatgtctaacaattcgttcaagccgacgccgcttcgcggcgcggcttaactcaagcgttagatgctgcaggcatcgtggtgtcacgctcgtcgtttggtatggcttcattcagctccggttcccaacgatcaaggcgagttacatgatcccccatgttgtgcaaaaaagcggttagctccttcggtcctccgatcgaggatttttcggcgctgcgctacgtccgcgaccgcgttgagggatcaagccacagcagcccactcgaccttctagccgacccagacgagccaagggatctttttggaatgctgctccgtcgtcaggctttccgacgtttgggtggttgaacagaagtcattatcgcacggaatgccaagcactcccgaggggaaccctgtggttggcatgcacatacaaatggacgaacggataaaccttttcacgcccttttaaatatccgattattctaataaacgctcttttctcttaggtttacccgccaatatatcctgtcaaacactgatagtttaaactgaaggcgggaaacgacaatctggcgcgcctgcggccgcctcgaggtcattcatatgcttgagaagagagtcgggatagtccaaaataaaacaaaggtaagattacctggtcaaaagtgaaaacatcagttaaaaggtggtataaagtaaaatatcggtaataaaaggtggcccaaagtgaaatttactcttttctactattataaaaattgaggatgtttttgtcggtactttgatacgtcatttttgtatgaattggtttttaagtttattcgcttttggaaatgcatatctgtatttgagtcgggttttaagttcgtttgcttttgtaaatacagagggatttgtataagaaatatctttaaaaaaacccatatgctaatttgacataatttttgagaaaaatatatattcaggcgaattctcacaatgaacaataataagattaaaatagctttcccccgttgcagcgcatgggtattttttctagtaaaaataaaagataaacttagactcaaaacatttacaaaaacaacccctaaagttcctaaagcccaaagtgctatccacgatccatagcaagcccagcccaacccaacccaacccaacccaccccagtccagccaactggacaatagtctccacacccccccactatcaccgtgagttgtccgcacgcaccgcacgtctcgcagccaaaaaaaaaaaaagaaagaaaaaaaagaaaaagaaaaaacagcaggtgggtccgggtcgtgggggccggaaacgcgaggaggatcgcgagccagcgacgaggccggccctccctccgcttccaaagaaacgccccccatcgccactatatacatacccccccctctcctcccatccccccaaccctaccaccaccaccaccaccacctccacctcctcccccctcgctgccggacgacgagctcctcccccctccccctccgccgccgccgcgccggtaaccaccccgcccctctcctctttctttctccgttttttttttccgtctcggtctcgatctttggccttggtagtttgggtgggcgagaggcggcttcgtgcgcgcccagatcggtgcgcgggaggggcgggatctcgcggctggggctctcgccggcgtggatccggcccggatctcgcggggaatggggctctcggatgtagatctgcgatccgccgttgttgggggagatgatggggggtttaaaatttccgccatgctaaacaagatcaggaagaggggaaaagggcactatggtttatatttttatatatttctgctgcttcgtcaggcttagatgtgctagatctttctttcttctttttgtgggtagaatttgaatccctcagcattgttcatcggtagtttttcttttcatgatttgtgacaaatgcagcctcgtgcggagcttttttgtaggtagaccgcggaccggtcgcgcctcagcagtcgctgtcgttaacccagcggtactcgctgaggcgatcgcgggcccggtaccctgcaatgtgaccctagacttgtccatcttctggattggccaacttaattaatgtatgaaataaaaggatgcacacatagtgacatgctaatcactataatgtgggcatcaaagttgtgtgttatgtgtaattactaattatctgaataagagaaagagatcatccatatttcttatcctaaatgaatgtcacgtgtctttataattctttgatgaaccagatgcattttattaaccaattccatatacatataaatattaatcatatataattaatatcaattgggttagcaaaacaaatctagtctaggtgtgttttgctaattattgggggatagtgcaaaaagaaatctacgttctcaataattcagatagaaaacttaataaagtgagataatttacatagattgcttttatcctttgatatatgtgaaaccatgcatgatataaggaaaatagatagagaaataattttttacatcgttgaatatgtaaacaatttaattcaagaagctaggaatataaatattgaggagtttatgattattattattattttgatgttcaatgaagttttttttaatttcatatgaagtatacaaaaattcttcatagatttttgtttctatgccgtagttatctttaatatatttgtggttgaagaaatttattgctagaaacgaatggattgtcaatttttttttaaagcaaatatatatgaaattatactgtatattattttagtcatgattaaaatgtggccttaattgaatcatctttctcattcattttttcaaaagcatatcaggatgattgatatttatctattttaaaaattaatttaagggttcaaattaaatttaacttaaaagtgtcctaaccgtagttaaaggtttactttaaaaaaatactatgaaaaatctaatcttctatgaatcgacctgcaggatttaaatccatcgttctggggcctaacgggccaagctttccgatcctacctgtcacttcatcaaaaggacagtagaaaaggaaggtggcacctacaaatgccatcattgcgataaaggaaaggctatcattcaagatgcctctgccgacagtggtcccaaagatggacccccacccacgaggagcatcgtggaaaaagaagacgttccaaccacgtcttcaaagcaagtggattgatgtgatacttccactgacgtaagggatgacgcacaatcccactatccttcgcaagacccttcctctatataaggaagttcatttcatttggagaggacacgctgaaatcaccagtctctctctacaagatcggggatctctagctagacgatcgtttcgcatgattgaacaagatggattgcacgcaggttctccggccgcttgggtggagaggctattcggctatgactgggcacaacagacaatcggctgctctgatgccgccgtgttccggctgtcagcgcaggggcgcccggttctttttgtcaagaccgacctgtccggtgccctgaatgaactgcaggacgaggcagcgcggctatcgtggctggccacgacgggcgttccttgcgcagctgtgctcgacgttgtcactgaagcgggaagggactggctgctattgggcgaagtgccggggcaggatctcctgtcatctcaccttgctcctgccgagaaagtatccatcatggctgatgcaatgcggcggctgcatacgcttgatccggctacctgcccattcgaccaccaagcgaaacatcgcatcgagcgagcacgtactcggatggaagccggtcttgtcgatcaggatgatctggacgaagagcatcaggggctcgcgccagccgaactgttcgccaggctcaaggcgcgcatgcccgacggcgaggatctcgtcgtgacccatggcgatgcctgcttgccgaatatcatggtggaaaatggccgcttttctggattcatcgactgtggccggctgggtgtggcggaccgctatcaggacatagcgttggctacccgtgatattgctgaagagcttggcggcgaatgggctgaccgcttcctcgtgctttacggtatcgccgctcccgattcgcagcgcatcgccttctatcgccttcttgacgagttcttctgagcgggactctggggttcgaagaattcccgatcgttcaaacatttggcaataaagtttcttaagattgaatcctgttgccggtcttgcgatgattatcatataatttctgttgaattacgttaagcatgtaataattaacatgtaatgcatgacgttatttatgagatgggtttttatgattagagtcccgcaattatacatttaatacgcgatagaaaacaaaatatagcgcgcaaactaggataaattatcgcgcgcggtgtcatctatgttactagatcggggatatcgcgtgtctttataattctttgatgaaccagatgcattttattaaccaattccatatacatataaatattaatcatatataattaatatcaattgggttagcaaaacaaatctagtctaggtgtgttttgctaattattgggggatagtgcaaaaagaaatctacgttctcaataattcagatagaaaacttaataaagtgagataatttacatagattgcttttatcctttgatatatgtgaaaccatgcatgatataaggaaaatagatagagaaataattttttacatcgttgaatatgtaaacaatttaattcaagaagctaggaatataaatattgaggagtttatgattattattattattttgatgttcaatgaagttttttttaatttcatatgaagtatacaaaaattcttcatagatttttgtttctatgccgtagttatctttaatatatttgtggttgaagaaatttattgctagaaacgaatggattgtcaatttttttttaaagcaaatatatatgaaattatactgtatattattttagtcatgattaaaatgtggccttaattgaatcatctttctcattcattttttcaaaagcatatcaggatgattgatatttatctattttaaaaattaatttaagggttcaaattaaatttaacttaaaagtgtcctaaccgtagttaaaggtttactttaaaaaaatactatgaaaaatctaatcttctatgaatcgaccgctgatcgatcgcggccgctgg

SEQ ID NO: 12604 - DNA, 9769 bp, synthetic DNA
ggtccgatgtgagacttttcaacaaagggtaatatccggaaacctcctcggattccattgcccagctatctgtcactttattgtgaagatagtggaaaaggaaggtggctcctacaaatgccatcattgcgataaaggaaaggccatcgttgaagatgcctctgccgacagtggtcccaaagatggacccccacccacgaggagcatcgtggaaaaagaagacgttccaaccacgtcttcaaagcaagtggattgatgtgatggtccgattgagacttttcaacaaagggtaatatccggaaacctcctcggattccattgcccagctatctgtcactttattgtgaagatagtggaaaaggaaggtggctcctacaaatgccatcattgcgataaaggaaaggccatcgttgaagatgcctctgccgacagtggtcccaaagatggacccccacccacgaggagcatcgtggaaaaagaagacgttccaaccacgtcttcaaagcaagtggattgatgtgatatctccactgacgtaagggatgacgcacaatcccactatccttcgcaagacccttcctctatataaggaagttcatttcatttggagaggaccaggtggtaccggcgcgcctcagcagtcgctgtcgttaacccagcggtactcgctgaggcgatcgcgggccctgatcacctgtcgtacagtatttctacatttgatgtgtgatttgtgaagaacatcaaacaaaacaagcactggctttaatatgatgataagtattatggtaattaattaattggcaaaaacaacaatgaagctaaaattttatttattgagccttgcggttaatttcttgtgatgatctttttttttattttctaattatatatagtttcctttgctttgaaatgctaaaggtttgagagagttatgctctttttttcttcctctttcttttttaactttatcatacaaattttgaataaaaatgtgagtacattgagctcatttaaataagcttgatggggatcagattgtcgtttcccgccttcagtttaaactatcagtgtttgacaggatatattggcgggtaaacctaagagaaaagagcgtttattagaataatcggatatttaaaagggcgtgaaaaggtttatccgttcgtccatttgtatgtgcatgccaaccacagggttcccctcgggagtgcttggcattccgtgcgataatgacttctgttcaaccacccaaacgtcggaaagcctgacgacggagcagcattccaaaaagatcccttggctcgtctgggtcggctagaaggtcgagtgggctgctgtggcttgatccctcaacgcggtcgcggacgtagcgcagcgccgaaaaatcctcgatcggaggaccgaaggagctaaccgcttttttgcacaacatgggggatcatgtaactcgccttgatcgttgggaaccggagctgaatgaagccataccaaacgacgagcgtgacaccacgatgcctgcagcatctaacgcttgagttaagccgcgccgcgaagcggcgtcggcttgaacgaattgttagacattatttgccgactaccttggtgatctcgcctttcacgtagtgaacaaattcttccaactgatctgcgcgcgaggccaagcgatcttcttgtccaagataagcctgcctagcttcaagtatgacgggctgatactgggccggcaggcgctccattgcccagtcggcagcgacatccttcggcgcgattttgccggttactgcgctgtaccaaatgcgggacaacgtaagcactacatttcgctcatcgccagcccagtcgggcggcgagttccatagcgttaaggtttcatttagcgcctcaaatagatcctgttcaggaaccggatcaaagagttcctccgccgctggacctaccaaggcaacgctatgttctcttgcttttgtcagcaagatagccagatcaatgtcgatcgtggctggctcgaagatacctgcaagaatgtcattgcgctgccattctccaaattgcagttcgcgcttagctggataacgccacggaatgatgtcgtcgtgcacaacaatggtgacttctacagcgcggagaatctcgctctctccaggggaagccgaagtttccaaaaggtcgttgatcaaagctcgccgcgttgtttcatcaagccttacggtcaccgtaaccagcaaatcaatatcactgtgtggcttcaggccgccatccactgcggagccgtacaaatgtacggccagcaacgtcggttcgagatggcgctcgatgacgccaactacctctgatagttgagtcgatacttcggcgatcaccgcttccctcatgatgtttaactcctgaattaagccgcgccgcgaagcggtgtcggcttgaatgaattgttaggcgtcatcctgtgctcccgacctgcagcaatggcaacaacgttgcgcaaactattaactggcgaactacttactctagcttcccggcaacaattaatagactggatggaggcggataaagttgcaggaccacttctgcgctcggcccttccggctggctggtttattgctgataaatctggagccggtgagcgtgggtctcgcggtatcattgcagcactggggccagatggtaagccctcccgtatcgtagttatctacacgacggggagtcaggcaactatggatgaacgaaatagacagatcgctgagataggtgcctcactgattaagcattggtaactgtcagaccaagtttactcatatatactttagattgatttaaaacttcatttttaatttaaaaggatctaggtgaagatcctttttgataatctcatgaccaaaatcccttaacgtgagttttcgttccactgagcgtcagaccccgtagaaaagatcaaaggatcttcttgagatcctttttttctgcgcgtaatctgctgcttgcaaacaaaaaaaccaccgctaccagcggtggtttgtttgccggatcaagagctaccaactctttttccgaaggtaactggcttcagcagagcgcagataccaaatactgtccttctagtgtagccgtagttaggccaccacttcaagaactctgtagcaccgcctacatacctcgctctgctaatcctgttaccagtggctgctgccagtggcgataagtcgtgtcttaccgggttggactcaagacgatagttaccggataaggcgcagcggtcgggctgaacggggggttcgtgcacacagcccagcttggagcgaacgacctacaccgaactgagatacctacagcgtgagctatgagaaagcgccacgcttcccgaagggagaaaggcggacaggtatccggtaagcggcagggtcggaacaggagagcgcacgagggagcttccagggggaaacgcctggtatctttatagtcctgtcgggtttcgccacctctgacttgagcgtcgatttttgtgatgctcgtcaggggggcggagcctatggaaaaacgccagcaacgcggcctttttacggttcctggccttttgctggccttttgctcacatgttctttcctgcgttatcccctgattctgtggataaccgtattaccgcctttgagtgagctgataccgctcgccgcagccgaacgaccgagcgcagcgagtcagtgagcgaggaagcggaagagcgcctgatgcggtattttctccttacgcatctgtgcggtatttcacaccgcatatggtgcactctcagtacaatctgctctgatgccgcatagttaagccagtatacactccgctatcgctacgtgactgggtcatggctgcgccccgacacccgccaacacccgctgacgcgccctgacgggcttgtctgctcccggcatccgcttacagacaagctgtgaccgtctccgggagctgcatgtgtcagaggttttcaccgtcatcaccgaaacgcgcgaggcagctgcggtaaagctcatcagcgtggtcgtgaagcgattcacagatgtctgcctgttcatccgcgtccagctcgttgagtttctccagaagcgttaatgtctggcttctgataaagcgggccatgttaagggcggttttttcctgtttggtcactgatgcctccgtgtaagggggatttctgttcatgggggtaatgataccgatgaaacgagagaggatgctcacgatacgggttactgatgatgaacatgcccggttactggaacgttgtgagggtaaacaactggcggtatggatgcggcgggaccagagaaaaatcactcagggtcaatgccagcgcttcgttaatacagatgtaggtgttccacagggtagccagcagcatcctgcgatgcagatccggaacataatggtgcagggcgctgacttccgcgtttccagactttacgaaacacggaaaccgaagaccattcatgttgttgctcaggtcgcagacgttttgcagcagcagtcgcttcacgttcgctcgcgtatcggtgattcattctgctaaccagtaaggcaaccccgccagcctagccgggtcctcaacgacaggagcacgatcatgcgcacccgtggccaggacccaacgctgcccgagatgcgccgcgtgcggctgctggagatggcggacgcgatggatatgttctgccaagggttggtttgcgcattcacagttctccgcaagaattgattggctccaattcttggagtggtgaatccgttagcgaggtgccgccggcttccattcaggtcgaggtggcccggctccatgcaccgcgacgcaacgcggggaggcagacaaggtatagggcggcgcctacaatccatgccaacccgttccatgtgctcgccgaggcggcataaatcgccgtgacgatcagcggtccaatgatcgaagttaggctggtaagagccgcgagcgatccttgaagctgtccctgatggtcgtcatctacctgcctggacagcatggcctgcaacgcgggcatcccgatgccgccggaagcgagaagaatcataatggggaaggccatccagcctcgcgtcgcgaacgccagcaagacgtagcccagcgcgtcggccgccatgccggcgataatggcctgcttctcgccgaaacgtttggtggcgggaccagtgacgaaggcttgagcgagggcgtgcaagattccgaataccgcaagcgacaggccgatcatcgtcgcgctccagcgaaagcggtcctcgccgaaaatgacccagagcgctgccggcacctgtcctacgagttgcatgataaagaagacagtcataagtgcggcgacgatagtcatgccccgcgcccaccggaaggagctgactgggttgaaggctctcaagggcatcggtcgatcgaccctttccgacgctcaccgggctggttgccctcgccgctgggctggcggccgtctatggccctgcaaacgcgccagaaacgccgtcgaagccgtgtgcgagacaccgcggccggccgccggcgttgtggatacctcgcggaaaacttggccctcactgacagatgaggggcggacgttgacacttgaggggccgactcacccggcgcggcgttgacagatgaggggcaggctcgatttcggccggcgacgtggagctggccagcctcgcaaatcggcgaaaacgcctgattttacgcgagtttcccacagatgatgtggacaagcctggggataagtgccctgcggtattgacacttgaggggcgcgactactgacagatgaggggcgcgatccttgacacttgaggggcagagtgctgacagatgaggggcgcacctattgacatttgaggggctgtccacaggcagaaaatccagcatttgcaagggtttccgcccgtttttcggccaccgctaacctgtcttttaacctgcttttaaaccaatatttataaaccttgtttttaaccagggctgcgccctgtgcgcgtgaccgcgcacgccgaaggggggtgcccccccttctcgaaccctcccggcccgctaacgcgggcctcccatccccccaggggctgcgcccctcggccgcgaacggcctcaccccaaaaatggcagccaagctaggaaaagtcccatgtggatcactccgttgccccgtcgctcaccgtgttggggggaaggtgcacatggctcagttctcaatggaaattatctgcctaaccggctcagttctgcgtagaaaccaacatgcaagctccaccgggtgcaaagcggcagcggcggcaggatatattcaattgtaaatggcttcatgtccgggaaatctacatggatcagcaatgagtatgatggtcaatatggagaaaaagaaagagtaattaccaattttttttcaattcaaaaatgtagatgtccgcagcgttattataaaatgaaagtacattttgataaaacgacaaattacgatccgtcgtatttataggcgaaagcaataaacaaattattctaattcggaaatctttatttcgacgtgtctacattcacgtccaaatgggggcttagatgagaaacttcacgatcgatgcggccaccactcgagaagcttactagtcaacaattggccaatctttgttctaaattgctaataaacgaccatttccgtcaattctccttggttgcaacagtctacccgtcaaatgtttactaatttataagtgtgaagtttgaattatgaaagacgaaatcgtattaaaaattcacaagaataaacaactccatagattttcaaaaaaacagtcacgagaaaaaaaccacagtccgtttgtctgctcttctagtttttattatttttctattaatagttttttgttatttcgagaataaaatttgaacgatgtccgaaccacaaaagccgagccgataaatcctaagccgagcctaactttagccgtaaccatcagtcacggctcccgggctaattcatttgaaccgaatcataatcaacggtttagatcaaactcaaaacaatctaacggcaacatagacgcgtcggtgagctaaaaagagtgtgaaagccaggtcaccatagcattgtctctcccagattttttatttgggaaataatagaagaaatagaaaaaaataaaagagtgagaaaaatcgtagagctatatattcgcacatgtactcgtttcgctttccttagtgttagctgctgccgctgttgtttctcctccatttctctatctttctctctcgctgcttctcgaatcttctgtatcatcttcttcttcttcaaggtgagtctctagatccgttcgcttgattttgctgctcgttagtcgttattgttgattctctatgccgatttcgctagatctgtttagcatgcgttgtggttttatgagaaaatctttgttttgggggttgcttgttatgtgattcgatccgtgcttgttggatcgatctgagttaattcttaaggtttatgtgttagatctatggagtttgaggattcttctcgcttctgtcgatctctcgctgttatttttgtttttttcagtgaagtgaagttgtttagttcgaaatgacttcgtgtatgctcgattgatctggttttaatcttcgatctgttaggtgttgatgtttacaagtgaattctagtgttttctcgttgagatctgtgaagtttgaacctagttttctcaataatcaacatatgaagcgatgtttgagtttcaataaacgctgctaatcttcgaaactaagttgtgatctgattcgtgtttacttcatgagcttatccaattcatttcggtttcattttactttttttttagtgaaccatggcgcaagttagcagaatctgcaatggtgtgcagaacccatctcttatctccaatctctcgaaatccagtcaacgcaaatctcccttatcggtttctctgaagacgcagcagcatccacgagcttatccgatttcgtcgtcgtggggattgaagaagagtgggatgacgttaattggctctgagcttcgtcctcttaaggtcatgtcttctgtttccacggcgtgcatgcttcatggagcttcatctaggccagctactgccaggaagtctagcgggctcagtggcaccgtgcgcatccctggcgataaaagtatttcacacaggagcttcatgttcggaggacttgctagtggagagacgagaatcactggtttgcttgagggcgaagatgttatcaacaccggtaaggcgatgcaagcaatgggtgccagaatccgaaaagagggcgatacgtggatcatcgacggtgttggtaacggaggattgctcgctcccgaagcgccacttgactttgggaacgcagctacggggtgccgtcttactatgggactggtaggcgtgtatgactttgactctaccttcatcggtgacgcgagcctcactaagagaccaatgggacgagtgctgaatcccctgagggagatgggtgtccaggtgaaatctgaggatggtgatcgtcttccggttactctgcgaggccccaagacccccacgccaatcacgtacagggttccgatggcgtcagcacaggtcaagtcagcggtactcctggcgggcctcaacacacctggaatcacaaccgtgattgaacccatcatgactagagaccacacggagaagatgttgcagggtttcggcgctaatctaacggtcgaaaccgacgccgacggcgtgaggacaatccgcttggagggcagaggtaaactgactggccaagtcatcgatgtgcctggagatccctcgtccacagcgtttcccctcgtagctgcgttgctcgtccctggatctgatgtgacgatcctgaatgtcctcatgaatccaactagaaccggcctcatcctcacattgcaggagatgggtgctgacatcgaggttatcaatcctaggttggcaggtggagaggatgtggccgatctgcgcgtgcgttctagtacactcaaaggcgtgaccgtccctgaggatcgcgctccatccatgatcgacgagtaccccattctcgccgttgctgctgcgtttgccgagggcgcaactgtaatgaacggccttgaggagttgagggttaaggagagtgacaggctgtccgcggtggcgaatggcctgaagctaaacggcgtggactgcgacgaaggtgaaacgtcccttgtagtccgtggtcgcccagacgggaaggggttggggaatgcttcgggagctgctgtggcgacgcaccttgatcatagaatcgccatgtcatttctggtgatgggacttgtctccgagaatccggtgaccgttgacgatgctaccatgatcgccacctcctttcctgagttcatggacctcatggcaggcttgggggccaagatcgagctgtctgatactaaggccgcttgaattcccgatcgttcaaacatttggcaataaagtttcttaagattgaatcctgttgccggtcttgcgatgattatcatataatttctgttgaattacgttaagcatgtaataattaacatgtaatgcatgacgttatttatgagatgggtttttatgattagagtcccgcaattatacatttaatacgcgatagaaaacaaaatatagcgcgcaaactaggataaattatcgcgcgcggtgtcatctatgttactagatcggggatcccacgtgcggaccgcctgcaggccgcgttatcaagctaactgca

SEQ ID NO: 12605 - DNA, 8504 bp, Artificial
  PMON99053
gtaccctcagcagtcgctgtgcgatcgccagcggtactcgctgaggtcgacgtagttagttaattcagctttcgttcgtatcatcggtttcgacaacgttcgtcaagttcaatgcatcagtttcattgcgcacacaccagaatcctactgagtttgagtattatggcattgggaaaactgtttttcttgtaccatttgttgtgcttgtaatttactgtgttttttattcggttttcgctatcgaactgtgaaatggaaatggatggagaagagttaatgaatgatatggtccttttgttcattctcaaattaatattatttgttttttctcttatttgttgtgtgttgaatttgaaattataagagatatgcaaacattttgttttgagtaaaaatgtgtcaaatcgtggcctctaatgaccgaagttaatatgaggagtaaaacacttgtagttgtaccattatgcttattcactaggcaacaaatatattttcagacctagaaaagctgcaaatgttactgaatacaagtatgtcctcttgtgttttagacatttatgaactttcctttatgtaattttccagaatccttgtcagattctaatcattgctttataattatagttatactcatggatttgtagttgagtatgaaaatattttttaatgcattttatgacttgccaattgattgacaacgcggccgccactcgagtggaagctagctttccgatcctacctgtcacttcatcaaaaggacagtagaaaaggaaggtggcacctacaaatgccatcattgcgataaaggaaaggctatcattcaagatgcctctgccgacagtggtcccaaagatggacccccacccacgaggagcatcgtggaaaaagaagacgttccaaccacgtcttcaaagcaagtggattgatgtgatacttccactgacgtaagggatgacgcacaatcccactatccttcgcaagacccttcctctatataaggaagttcatttcatttggagaggacacgctgaaatcaccagtctctctctacaagatcggggatctctagctagacgatcgtttcgcatgattgaacaagatggattgcacgcaggttctccggccgcttgggtggagaggctattcggctatgactgggcacaacagacaatcggctgctctgatgccgccgtgttccggctgtcagcgcaggggcgcccggttctttttgtcaagaccgacctgtccggtgccctgaatgaactgcaggacgaggcagcgcggctatcgtggctggccacgacgggcgttccttgcgcagctgtgctcgacgttgtcactgaagcgggaagggactggctgctattgggcgaagtgccggggcaggatctcctgtcatctcaccttgctcctgccgagaaagtatccatcatggctgatgcaatgcggcggctgcatacgcttgatccggctacctgcccattcgaccaccaagcgaaacatcgcatcgagcgagcacgtactcggatggaagccggtcttgtcgatcaggatgatctggacgaagagcatcaggggctcgcgccagccgaactgttcgccaggctcaaggcgcgcatgcccgacggcgaggatctcgtcgtgacccatggcgatgcctgcttgccgaatatcatggtggaaaatggccgcttttctggattcatcgactgtggccggctgggtgtggcggaccgctatcaggacatagcgttggctacccgtgatattgctgaagagcttggcggcgaatgggctgaccgcttcctcgtgctttacggtatcgccgctcccgattcgcagcgcatcgccttctatcgccttcttgacgagttcttctgagcgggactctggggttcgatccccaattcccgatcgttcaaacatttggcaataaagtttcttaagattgaatcctgttgccggtcttgcgatgattatcatataatttctgttgaattacgttaagcatgtaataattaacatgtaatgcatgacgttatttatgagatgggtttttatgattagagtcccgcaattatacatttaatacgcgatagaaaacaaaatatagcgcgcaaactaggataaattatcgcgcgcggtgtcatctatgttactagatcggggatcgggccactcgagtggtggccgcatcgatcgtgaagtttctcatctaagcccccatttggacgtgaatgtagacacgtcgaaataaagatttccgaattagaataatttgtttattgctttcgcctataaatacgacggatcgtaatttgtcgttttatcaaaatgtactttcattttataataacgctgcggacatctacatttttgaattgaaaaaaaattggtaattactctttctttttctccatattgaccatcatactcattgctgatccatgtagatttcccggacatgaagccatttacaattgaatatatcctgccgccgctgccgctttgcacccggtggagcttgcatgttggtttctacgcagaactgagccggttaggcagataatttccattgagaactgagccatgtgcaccttccccccaacacggtgagcgacggggcaacggagtgatccacatgggacttttcctagcttggctgccatttttggggtgaggccgttcgcggccgaggggcgcagcccctggggggatgggaggcccgcgttagcgggccgggagggttcgagaagggggggcaccccccttcggcgtgcgcggtcacgcgcacagggcgcagccctggttaaaaacaaggtttataaatattggtttaaaagcaggttaaaagacaggttagcggtggccgaaaaacgggcggaaacccttgcaaatgctggattttctgcctgtggacagcccctcaaatgtcaataggtgcgcccctcatctgtcagcactctgcccctcaagtgtcaaggatcgcgcccctcatctgtcagtagtcgcgcccctcaagtgtcaataccgcagggcacttatccccaggcttgtccacatcatctgtgggaaactcgcgtaaaatcaggcgttttcgccgatttgcgaggctggccagctccacgtcgccggccgaaatcgagcctgcccctcatctgtcaacgccgcgccgggtgagtcggcccctcaagtgtcaacgtccgcccctcatctgtcagtgagggccaagttttccgcgaggtatccacaacgccggcggccggccgcggtgtctcgcacacggcttcgacggcgtttctggcgcgtttgcagggccatagacggccgccagcccagcggcgagggcaaccagcccggtgagcgtcggaaagggtcgatcgaccgatgcccttgagagccttcaacccagtcagctccttccggtgggcgcggggcatgactatcgtcgccgcacttatgactgtcttctttatcatgcaactcgtaggacaggtgccggcagcgctctgggtcattttcggcgaggaccgctttcgctggagcgcgacgatgatcggcctgtcgcttgcggtattcggaatcttgcacgccctcgctcaagccttcgtcactggtcccgccaccaaacgtttcggcgagaagcaggccattatcgccggcatggcggccgacgcgctgggctacgtcttgctggcgttcgcgacgcgaggctggatggccttccccattatgattcttctcgcttccggcggcatcgggatgcccgcgttgcaggccatgctgtccaggcaggtagatgacgaccatcagggacagcttcaaggatcgctcgcggctcttaccagcctaacttcgatcattggaccgctgatcgtcacggcgatttatgccgcctcggcgagcacatggaacgggttggcatggattgtaggcgccgccctataccttgtctgcctccccgcgttgcgtcgcggtgcatggagccgggccacctcgacctgaatggaagccggcggcacctcgctaacggattcaccactccaagaattggagccaatcaattcttgcggagaactgtgaatgcgcaaaccaacccttggcagaacatatccatcgcgtccgccatctccagcagccgcacgcggcgcatctcgggcagcgttgggtcctggccacgggtgcgcatgatcgtgctcctgtcgttgaggacccggctaggctggcggggttgccttactggttagcagaatgaatcaccgatacgcgagcgaacgtgaagcgactgctgctgcaaaacgtctgcgacctgagcaacaacatgaatggtcttcggtttccgtgtttcgtaaagtctggaaacgcggaagtcagcgccctgcaccattatgttccggatctgcatcgcaggatgctgctggctaccctgtggaacacctacatctgtattaacgaagcgctggcattgaccctgagtgatttttctctggtcccgccgcatccataccgccagttgtttaccctcacaacgttccagtaaccgggcatgttcatcatcagtaacccgtatcgtgagcatcctctctcgtttcatcggtatcattacccccatgaacagaaatcccccttacacggaggcatcagtgaccaaacaggaaaaaaccgcccttaacatggcccgctttatcagaagccagacattaacgcttctggagaaactcaacgagctggacgcggatgaacaggcagacatctgtgaatcgcttcacgaccacgctgatgagctttaccgcagctgcctcgcgcgtttcggtgatgacggtgaaaacctctgacacatgcagctcccggagacggtcacagcttgtctgtaagcggatgccgggagcagacaagcccgtcagggcgcgtcagcgggtgttggcgggtgtcggggcgcagccatgacccagtcacgtagcgatagcggagtgtatactggcttaactatgcggcatcagagcagattgtactgagagtgcaccatatgcggtgtgaaataccgcacagatgcgtaaggagaaaataccgcatcaggcgctcttccgcttcctcgctcactgactcgctgcgctcggtcgttcggctgcggcgagcggtatcagctcactcaaaggcggtaatacggttatccacagaatcaggggataacgcaggaaagaacatgtgagcaaaaggccagcaaaaggccaggaaccgtaaaaaggccgcgttgctggcgtttttccataggctccgcccccctgacgagcatcacaaaaatcgacgctcaagtcagaggtggcgaaacccgacaggactataaagataccaggcgtttccccctggaagctccctcgtgcgctctcctgttccgaccctgccgcttaccggatacctgtccgcctttctcccttcgggaagcgtggcgctttctcatagctcacgctgtaggtatctcagttcggtgtaggtcgttcgctccaagctgggctgtgtgcacgaaccccccgttcagcccgaccgctgcgccttatccggtaactatcgtcttgagtccaacccggtaagacacgacttatcgccactggcagcagccactggtaacaggattagcagagcgaggtatgtaggcggtgctacagagttcttgaagtggtggcctaactacggctacactagaaggacagtatttggtatctgcgctctgctgaagccagttaccttcggaaaaagagttggtagctcttgatccggcaaacaaaccaccgctggtagcggtggtttttttgtttgcaagcagcagattacgcgcagaaaaaaaggatctcaagaagatcctttgatcttttctacggggtctgacgctcagtggaacgaaaactcacgttaagggattttggtcatgagattatcaaaaaggatcttcacctagatccttttaaattaaaaatgaagttttaaatcaatctaaagtatatatgagtaaacttggtctgacagttaccaatgcttaatcagtgaggcacctatctcagcgatctgtctatttcgttcatccatagttgcctgactccccgtcgtgtagataactacgatacgggagggcttaccatctggccccagtgctgcaatgataccgcgagacccacgctcaccggctccagatttatcagcaataaaccagccagccggaagggccgagcgcagaagtggtcctgcaactttatccgcctccatccagtctattaattgttgccgggaagctagagtaagtagttcgccagttaatagtttgcgcaacgttgttgccattgctgcaggtcgggagcacaggatgacgcctaacaattcattcaagccgacaccgcttcgcggcgcggcttaattcaggagttaaacatcatgagggaagcggtgatcgccgaagtatcgactcaactatcagaggtagttggcgtcatcgagcgccatctcgaaccgacgttgctggccgtacatttgtacggctccgcagtggatggcggcctgaagccacacagtgatattgatttgctggttacggtgaccgtaaggcttgatgaaacaacgcggcgagctttgatcaacgaccttttggaaacttcggcttcccctggagagagcgagattctccgcgctgtagaagtcaccattgttgtgcacgacgacatcattccgtggcgttatccagctaagcgcgaactgcaatttggagaatggcagcgcaatgacattcttgcaggtatcttcgagccagccacgatcgacattgatctggctatcttgctgacaaaagcaagagaacatagcgttgccttggtaggtccagcggcggaggaactctttgatccggttcctgaacaggatctatttgaggcgctaaatgaaaccttaacgctatggaactcgccgcccgactgggctggcgatgagcgaaatgtagtgcttacgttgtcccgcatttggtacagcgcagtaaccggcaaaatcgcgccgaaggatgtcgctgccgactgggcaatggagcgcctgccggcccagtatcagcccgtcatacttgaagctaggcaggcttatcttggacaagaagatcgcttggcctcgcgcgcagatcagttggaagaatttgttcactacgtgaaaggcgagatcaccaaggtagtcggcaaataatgtctaacaattcgttcaagccgacgccgcttcgcggcgcggcttaactcaagcgttagatgctgcaggcatcgtggtgtcacgctcgtcgtttggtatggcttcattcagctccggttcccaacgatcaaggcgagttacatgatcccccatgttgtgcaaaaaagcggttagctccttcggtcctccgatcgaggatttttcggcgctgcgctacgtccgcgaccgcgttgagggatcaagccacagcagcccactcgaccttctagccgacccagacgagccaagggatctttttggaatgctgctccgtcgtcaggctttccgacgtttgggtggttgaacagaagtcattatcgcacggaatgccaagcactcccgaggggaaccctgtggttggcatgcacatacaaatggacgaacggataaaccttttcacgcccttttaaatatccgattattctaataaacgctcttttctcttaggtttacccgccaatatatcctgtcaaacactgatagtttaaactgaaggcgggaaacgacaatctgatccccatcaagcttggccagcttctgcaggtccgattgagacttttcaacaaagggtaatatccggaaacctcctcggattccattgcccagctatctgtcactttattgtgaagatagtggaaaaggaaggtggctcctacaaatgccatcattgcgataaaggaaaggccatcgttgaagatgcctctgccgacagtggtcccaaagatggacccccacccacgaggagcatcgtggaaaaagaagacgttccaaccacgtcttcaaagcaagtggattgatgtgatggtccgattgagacttttcaacaaagggtaatatccggaaacctcctcggattccattgcccagctatctgtcactttattgtgaagatagtggaaaaggaaggtggctcctacaaatgccatcattgcgataaaggaaaggccatcgttgaagatgcctctgccgacagtggtcccaaagatggacccccacccacgaggagcatcgtggaaaaagaagacgttccaaccacgtcttcaaagcaagtggattgatgtgatatctccactgacgtaagggatgacgcacaatcccactatccttcgcaagacccttcctctatataaggaagttcatttcatttggagaggacacagaaaaatttgctacattgtttcacaaacttcaaatattattcatttatttgtcagctttcaaactctttgtttcttgtttgttgattagatctg

SEQ ID NO: 12606 - DNA, 10076 bp, Artificial
  PMON17730
gaactgagccggttaggcagataatttccattgagaactgagccatgtgcaccttccccccaacacggtgagcgacggggcaacggagtgatccacatgggacttttcctagcttggctgccatttttggggtgaggccgttcgcggccgaggggcgcagcccctggggggatgggaggcccgcgttagcgggccgggagggttcgagaagggggggcaccccccttcggcgtgcgcggtcacgcgcacagggcgcagccctggttaaaaacaaggtttataaatattggtttaaaagcaggttaaaagacaggttagcggtggccgaaaaacgggcggaaacccttgcaaatgctggattttctgcctgtggacagcccctcaaatgtcaataggtgcgcccctcatctgtcagcactctgcccctcaagtgtcaaggatcgcgcccctcatctgtcagtagtcgcgcccctcaagtgtcaataccgcagggcacttatccccaggcttgtccacatcatctgtgggaaactcgcgtaaaatcaggcgttttcgccgatttgcgaggctggccagctccacgtcgccggccgaaatcgagcctgcccctcatctgtcaacgccgcgccgggtgagtcggcccctcaagtgtcaacgtccgcccctcatctgtcagtgagggccaagttttccgcgaggtatccacaacgccggcggccggccgcggtgtctcgcacacggcttcgacggcgtttctggcgcgtttgcagggccatagacggccgccagcccagcggcgagggcaaccagcccggtgagcgtcggaaagggtcgatcgaccgatgcccttgagagccttcaacccagtcagctccttccggtgggcgcggggcatgactatcgtcgccgcacttatgactgtcttctttatcatgcaactcgtaggacaggtgccggcagcgctctgggtcattttcggcgaggaccgctttcgctggagcgcgacgatgatcggcctgtcgcttgcggtattcggaatcttgcacgccctcgctcaagccttcgtcactggtcccgccaccaaacgtttcggcgagaagcaggccattatcgccggcatggcggccgacgcgctgggctacgtcttgctggcgttcgcgacgcgaggctggatggccttccccattatgattcttctcgcttccggcggcatcgggatgcccgcgttgcaggccatgctgtccaggcaggtagatgacgaccatcagggacagcttcaaggatcgctcgcggctcttaccagcctaacttcgatcattggaccgctgatcgtcacggcgatttatgccgcctcggcgagcacatggaacgggttggcatggattgtaggcgccgccctataccttgtctgcctccccgcgttgcgtcgcggtgcatggagccgggccacctcgacctgaatggaagccggcggcacctcgctaacggattcaccactccaagaattggagccaatcaattcttgcggagaactgtgaatgcgcaaaccaacccttggcagaacatatccatcgcgtccgccatctccagcagccgcacgcggcgcatctcgggcagcgttgggtcctggccacgggtgcgcatgatcgtgctcctgtcgttgaggacccggctaggctggcggggttgccttactggttagcagaatgaatcaccgatacgcgagcgaacgtgaagcgactgctgctgcaaaacgtctgcgacctgagcaacaacatgaatggtcttcggtttccgtgtttcgtaaagtctggaaacgcggaagtcagcgccctgcaccattatgttccggatctgcatcgcaggatgctgctggctaccctgtggaacacctacatctgtattaacgaagcgctggcattgaccctgagtgatttttctctggtcccgccgcatccataccgccagttgtttaccctcacaacgttccagtaaccgggcatgttcatcatcagtaacccgtatcgtgagcatcctctctcgtttcatcggtatcattacccccatgaacagaaatcccccttacacggaggcatcagtgaccaaacaggaaaaaaccgcccttaacatggcccgctttatcagaagccagacattaacgcttctggagaaactcaacgagctggacgcggatgaacaggcagacatctgtgaatcgcttcacgaccacgctgatgagctttaccgcagctgcctcgcgcgtttcggtgatgacggtgaaaacctctgacacatgcagctcccggagacggtcacagcttgtctgtaagcggatgccgggagcagacaagcccgtcagggcgcgtcagcgggtgttggcgggtgtcggggcgcagccatgacccagtcacgtagcgatagcggagtgtatactggcttaactatgcggcatcagagcagattgtactgagagtgcaccatatgcggtgtgaaataccgcacagatgcgtaaggagaaaataccgcatcaggcgctcttccgcttcctcgctcactgactcgctgcgctcggtcgttcggctgcggcgagcggtatcagctcactcaaaggcggtaatacggttatccacagaatcaggggataacgcaggaaagaacatgtgagcaaaaggccagcaaaaggccaggaaccgtaaaaaggccgcgttgctggcgtttttccataggctccgcccccctgacgagcatcacaaaaatcgacgctcaagtcagaggtggcgaaacccgacaggactataaagataccaggcgtttccccctggaagctccctcgtgcgctctcctgttccgaccctgccgcttaccggatacctgtccgcctttctcccttcgggaagcgtggcgctttctcatagctcacgctgtaggtatctcagttcggtgtaggtcgttcgctccaagctgggctgtgtgcacgaaccccccgttcagcccgaccgctgcgccttatccggtaactatcgtcttgagtccaacccggtaagacacgacttatcgccactggcagcagccactggtaacaggattagcagagcgaggtatgtaggcggtgctacagagttcttgaagtggtggcctaactacggctacactagaaggacagtatttggtatctgcgctctgctgaagccagttaccttcggaaaaagagttggtagctcttgatccggcaaacaaaccaccgctggtagcggtggtttttttgtttgcaagcagcagattacgcgcagaaaaaaaggatctcaagaagatcctttgatcttttctacggggtctgacgctcagtggaacgaaaactcacgttaagggattttggtcatgagattatcaaaaaggatcttcacctagatccttttaaattaaaaatgaagttttaaatcaatctaaagtatatatgagtaaacttggtctgacagttaccaatgcttaatcagtgaggcacctatctcagcgatctgtctatttcgttcatccatagttgcctgactccccgtcgtgtagataactacgatacgggagggcttaccatctggccccagtgctgcaatgataccgcgagacccacgctcaccggctccagatttatcagcaataaaccagccagccggaagggccgagcgcagaagtggtcctgcaactttatccgcctccatccagtctattaattgttgccgggaagctagagtaagtagttcgccagttaatagtttgcgcaacgttgttgccattgctgcaggtcgggagcacaggatgacgcctaacaattcattcaagccgacaccgcttcgcggcgcggcttaattcaggagttaaacatcatgagggaagcggtgatcgccgaagtatcgactcaactatcagaggtagttggcgtcatcgagcgccatctcgaaccgacgttgctggccgtacatttgtacggctccgcagtggatggcggcctgaagccacacagtgatattgatttgctggttacggtgaccgtaaggcttgatgaaacaacgcggcgagctttgatcaacgaccttttggaaacttcggcttcccctggagagagcgagattctccgcgctgtagaagtcaccattgttgtgcacgacgacatcattccgtggcgttatccagctaagcgcgaactgcaatttggagaatggcagcgcaatgacattcttgcaggtatcttcgagccagccacgatcgacattgatctggctatcttgctgacaaaagcaagagaacatagcgttgccttggtaggtccagcggcggaggaactctttgatccggttcctgaacaggatctatttgaggcgctaaatgaaaccttaacgctatggaactcgccgcccgactgggctggcgatgagcgaaatgtagtgcttacgttgtcccgcatttggtacagcgcagtaaccggcaaaatcgcgccgaaggatgtcgctgccgactgggcaatggagcgcctgccggcccagtatcagcccgtcatacttgaagctaggcaggcttatcttggacaagaagatcgcttggcctcgcgcgcagatcagttggaagaatttgttcactacgtgaaaggcgagatcaccaaggtagtcggcaaataatgtctaacaattcgttcaagccgacgccgcttcgcggcgcggcttaactcaagcgttagatgctgcaggcatcgtggtgtcacgctcgtcgtttggtatggcttcattcagctccggttcccaacgatcaaggcgagttacatgatcccccatgttgtgcaaaaaagcggttagctccttcggtcctccgatcgaggatttttcggcgctgcgctacgtccgcgaccgcgttgagggatcaagccacagcagcccactcgaccttctagccgacccagacgagccaagggatctttttggaatgctgctccgtcgtcaggctttccgacgtttgggtggttgaacagaagtcattatcgcacggaatgccaagcactcccgaggggaaccctgtggttggcatgcacatacaaatggacgaacggataaaccttttcacgcccttttaaatatccgattattctaataaacgctcttttctcttaggtttacccgccaatatatcctgtcaaacactgatagtttaaactgaaggcgggaaacgacaatctgatccccatcaagctagcttctgcaggtcctgctcgagcggccgcgttaacaagcttatatagatttcttaacgacaatctcgcattgtttattgcctcacatggtgacacacagctcttacatttgtccttatactcacggtgcagtgcactactactgtaaccccatggtctggaaaacagcaacgcaacctttctgccttggaacagcaagctatacagcgctatataacaaacttgcacaataatatgctacatttctgaaagcaaactccgcttatcttcgcgttaaggaatggtattacacttaaaatgacaaaatatcacactttagaaccccacgcctttacctaaaaaaaagttgattgatacaagaacaaatgtttacagcttgttacacctcccatcaagcaaagaaatggaatcttttattttatgtacacgtgtacgggtagctattgtttataaattgcagaagacacctcaacatgatggataattgtatacgcaaaactactttcctcgaattccccattctataaattccagttaaacttaattcgtaagatcaatcataattctcgagttgcaaacctctagaaccatcttccacacactcaagccacactattggagaacacacagggacaacacaccataagatccaagggaggcctccgccgccgccggtaaccaccccgcccctctcctctttctttctccgtttttttttccgtctcggtctcgatctttggccttggtagtttgggtgggcgagaggcggcttcgtgcgcgcccagatcggtgcgcgggaggggcgggatctcgcggctggggctctcgccggcgtggatccggcccggatctcgcggggaatggggctctcggatgtagatctgcgatccgccgttgttgggggagatgatggggggtttaaaatttccgccgtgctaaacaagatcaggaagaggggaaaagggcactatggtttatatttttatatatttctgctgcttcgtcaggcttagatgtgctagatctttctttcttctttttgtgggtagaatttgaatccctcagcattgttcatcggtagtttttcttttcatgatttgtgacaaatgcagcctcgtgcggagcttttttgtaggtagaagtgatcaaccatggaaattcaaaacaaagcaatgttgatcacttatgctgattcgttgggcaaaaacttaaaagatgttcatcaagtcttgaaagaagatattggagatgcgattggtggggttcatttgttgcctttcttcccttcaacaggtgatcgcggttttgcgccagccgattatactcgtgttgatgccgcatttggtgattgggcagatgtcgaagcattgggtgaagaatactatttgatgtttgacttcatgattaaccatatttctcgtgaatcagtgatgtatcaagattttaagaagaatcatgacgattcaaagtataaagatttctttattcgttgggaaaagttctgggcaaaggccggcgaaaaccgtccaacacaagccgatgttgacttaatttacaagcgtaaagataaggcaccaacgcaagaaatcacttttgatgatggcacaacagaaaacttgtggaatacttttggtgaagaacaaattgacattgatgttaattcagccattgccaaggaatttattaagacaacccttgaagacatggtaaaacatggtgctaacttgattcgtttggatgcctttgcgtatgcagttaaaaaagttgacacaaatgacttcttcgttgagccagaaatctgggacactttgaatgaagtacgtgaaattttgacaccattaaaggctgaaattttaccagaaattcatgaacattactcaatccctaaaaagatcaatgatcatggttacttcacctatgactttgcattaccaatgacaacgctttacacattgtattcaggtaagacaaatcaattggcaaagtggttgaagatgtcaccaatgaagcaattcacaacattggacacgcatgatggtattggtgtcgttgatgcccgtgatattctaactgatgatgaaattgactacgcttctgaacaactttacaaggttggcgcgaatgtcaaaaagacatattcatctgcttcatacaacaaccttgatatttaccaaattaactcaacttattattcagcattgggaaatgatgatgcagcatacttgttgagtcgtgtcttccaagtctttgcgcctggaattccacaaatttattacgttggtttgttggcaggtgaaaacgatatcgcgcttttggagtcaactaaagaaggtcgtaatattaaccgtcattactatacgcgtgaagaagttaagtcagaagttaagcgaccagttgttgctaacttattgaagctattgtcatggcgtaatgaaagccctgcatttgatttggctggctcaatcacagttgacacgccaactgatacaacaattgtggtgacacgtcaagatgaaaatggtcaaaacaaagctgtattaacagccgatgcggccaacaaaacttttgaaatcgttgagaatggtcaaactgttatgagcagtgataatttgactcagaactaatgagctcgaattctgcatgcgtttggacgtatgctcattcaggttggagccaatttggttgatgtgtgtgcgagttcttgcgagtctgatgagacatctctgtattgtgtttctttccccagtgttttctgtacttgtgtaatcggctaatcgccaacagattcggcgatgaataaatgagaaataaattgttctgattttgagtgcaaaaaaaaaggaattagatctgtgtgtgttttttggatccccggggcggccgctctagaactagtggatcccccccttaattaagggggctgcaggaattcataacttcgtataatgtatgctatacgaagttatagcttggtcgagtggaagctagctttccgatcctacctgtcacttcatcaaaaggacagtagaaaaggaaggtggcacctacaaatgccatcattgcgataaaggaaaggctatcattcaagatgcctctgccgacagtggtcccaaagatggacccccacccacgaggagcatcgtggaaaaagaagacgttccaaccacgtcttcaaagcaagtggattgatgtgatacttccactgacgtaagggatgacgcacaatcccactatccttcgcaagacccttcctctatataaggaagttcatttcatttggagaggacacgctgaaatcaccagtctctctctacaagatcggggatctctagctagacgatcgtttcgcatgattgaacaagatggattgcacgcaggttctccggccgcttgggtggagaggctattcggctatgactgggcacaacagacaatcggctgctctgatgccgccgtgttccggctgtcagcgcaggggcgcccggttctttttgtcaagaccgacctgtccggtgccctgaatgaactgcaggacgaggcagcgcggctatcgtggctggccacgacgggcgttccttgcgcagctgtgctcgacgttgtcactgaagcgggaagggactggctgctattgggcgaagtgccggggcaggatctcctgtcatctcaccttgctcctgccgagaaagtatccatcatggctgatgcaatgcggcggctgcatacgcttgatccggctacctgcccattcgaccaccaagcgaaacatcgcatcgagcgagcacgtactcggatggaagccggtcttgtcgatcaggatgatctggacgaagagcatcaggggctcgcgccagccgaactgttcgccaggctcaaggcgcgcatgcccgacggcgaggatctcgtcgtgacgcatggcgatgcctgcttgccgaatatcatggtggaaaatggccgcttttctggattcatcgactgtggccggctgggtgtggcggaccgctatcaggacatagcgttggctacccgtgatattgctgaagagcttggcggcgaatgggctgaccgcttcctcgtgctttacggtatcgccgctcccgattcgcagcgcatcgccttctatcgccttcttgacgagttcttctgagcgggactctggggttcgatccccaattcccgatcgttcaaacatttggcaataaagtttcttaagattgaatcctgttgccggtcttgcgatgattatcatataatttctgttgaattacgttaagcatgtaataattaacatgtaatgcatgacgttatttatgagatgggtttttatgattagagtcccgcaattatacatttaatacgcgatagaaaacaaaatatagcgcgcaaactaggataaattatcgcgcgcggtgtcatctatgttactagatcggggatcgggccactcgaccaagctataacttcgtataatgtatgctatacgaagttatcgcgccaaatcgtgaagtttctcatctaagcccccatttggacgtgaatgtagacacgtcgaaataaagatttccgaattagaataatttgtttattgctttcgcctataaatacgacggatcgtaatttgtcgttttatcaaaatgtactttcattttataataacgctgcggacatctacatttttgaattgaaaaaaaattggtaattactctttctttttctccatattgaccatcatactcattgctgatccatgtagatttcccggacatgaagccatttacaattgaatatatcctgccgccgctgccgctttgcacccggtggagcttgcatgttggtttctacgcag

SEQ ID NO: 12607 - DNA, 1473 bp, Leuconostoc mesenteroides
atggaaattcaaaacaaagcaatgttgatcacttatgctgattcgttgggcaaaaacttaaaagatgttcatcaagtcttgaaagaagatattggagatgcgattggtggggttcatttgttgcctttcttcccttcaacaggtgatcgcggttttgcgccagccgattatactcgtgttgatgccgcatttggtgattgggcagatgtcgaagcattgggtgaagaatactatttgatgtttgacttcatgattaaccatatttctcgtgaatcagtgatgtatcaagattttaagaagaatcatgacgattcaaagtataaagatttctttattcgttgggaaaagttctgggcaaaggccggcgaaaaccgtccaacacaagccgatgttgacttaatttacaagcgtaaagataaggcaccaacgcaagaaatcacttttgatgatggcacaacagaaaacttgtggaatacttttggtgaagaacaaattgacattgatgttaattcagccattgccaaggaatttattaagacaacccttgaagacatggtaaaacatggtgctaacttgattcgtttggatgcctttgcgtatgcagttaaaaaagttgacacaaatgacttcttcgttgagccagaaatctgggacactttgaatgaagtacgtgaaattttgacaccattaaaggctgaaattttaccagaaattcatgaacattactcaatccctaaaaagatcaatgatcatggttacttcacctatgactttgcattaccaatgacaacgctttacacattgtattcaggtaagacaaatcaattggcaaagtggttgaagatgtcaccaatgaagcaattcacaacattggacacgcatgatggtattggtgtcgttgatgcccgtgatattctaactgatgatgaaattgactacgcttctgaacaactttacaaggttggcgcgaatgtcaaaaagacatattcatctgcttcatacaacaaccttgatatttaccaaattaactcaacttattattcagcattgggaaatgatgatgcagcatacttgttgagtcgtgtcttccaagtctttgcgcctggaattccacaaatttattacgttggtttgttggcaggtgaaaacgatatcgcgcttttggagtcaactaaagaaggtcgtaatattaaccgtcattactatacgcgtgaagaagttaagtcagaagttaagcgaccagttgttgctaacttattgaagctattgtcatggcgtaatgaaagccctgcatttgatttggctggctcaatcacagttgacacgccaactgatacaacaattgtggtgacacgtcaagatgaaaatggtcaaaacaaagctgtattaacagccgatgcggccaacaaaacttttgaaatcgttgagaatggtcaaactgttatgagcagtgataatttgactcagaactaa

SEQ ID NO: 12608 - protein, 474 aa, ARTIFICIAL
  consensus sequence
  Misc_feature (1)..(1): location 1 can be a   or Met
  Misc_feature (2)..(2): location 2 can be a   or Asp or Glu
  Misc_feature (3)..(3): location 3 can be Ile or a   or His
  Misc_feature (4)..(4): location 4 can be a   or Phe
  Misc_feature (5)..(5): location 5 can be Asn or a   or Asp
  Misc_feature (6)..(6): location 6 can be Asn or a
  Misc_feature (7)..(7): location 7 can be a   or Asp or Ser
  Misc_feature (8)..(8): location 8 can be a   or Asp
  Misc_feature (9)..(9): location 9 can be a   or Leu
  Misc_feature (10)..(10): location 10 can be a   or Glu
  Misc_feature (11)..(11): location 11 can be a   or Tyr
  Misc_feature (12)..(12): location 12 can be a   or Val or Leu
  Misc_feature (13)..(13): location 13 can be a   or Val
  Misc_feature (14)..(14): location 14 can be a   or Asp
  Misc_feature (15)..(15): location 15 can be a   or Asp or Glu
  Misc_feature (16)..(16): location 16 can be a   or Tyr or Phe
  Misc_feature (17)..(17): location 17 can be a   or Tyr or His
  Misc_feature (18)..(18): location 18 can be a   or Asp or Met or Gly
  Misc_feature (19)..(19): location 19 can be a   or Val or Ala or Phe
  Misc_feature (20)..(20): location 20 can be a   or Ala or Pro or Ser or His
  Misc_feature (21)..(21): location 21 can be a   or Asp
  Misc_feature (22)..(22): location 22 can be a   or Leu or Phe or Ser
  Misc_feature (23)..(23): location 23 can be a   or Asp or Glu or Ala or His
  Misc_feature (24)..(24): location 24 can be a   or Val or Asp
  Misc_feature (25)..(25): location 25 can be a   or Asp or Glu
  Misc_feature (26)..(26): location 26 can be a   or Asp or Glu or Leu
  Misc_feature (27)..(27): location 27 can be a   or Glu or Pro or Thr
  Misc_feature (28)..(28): location 28 can be a   or Phe or Ser
  Misc_feature (29)..(29): location 29 can be a   or Val or Gly
  Misc_feature (30)..(30): location 30 can be a   or Glu or Ser
  Misc_feature (31)..(31): location 31 can be a   or Val or Phe or Gly
  Misc_feature (32)..(32): location 32 can be a   or Asp or Ser
  Misc_feature (33)..(33): location 33 can be a   or Val or Asp or His
  Misc_feature (34)..(34): location 34 can be Ile or a   or Lys or Asp or Thr
  Misc_feature (35)..(35): location 35 can be a   or Val or Asp or Ser
  Misc_feature (36)..(36): location 36 can be a   or Tyr or Glu or Pro
  Misc_feature (37)..(37): location 37 can be a   or Tyr or Glu or Ala or Ser
  Misc_feature (38)..(38): location 38 can be a   or Asp or Leu
  Misc_feature (39)..(39): location 39 can be a   or Glu or Ser or Thr
  Misc_feature (40)..(40): location 40 can be a   or Asp or Phe or Ser
  Misc_feature (41)..(41): location 41 can be a   or Asp or Phe
  Misc_feature (42)..(42): location 42 can be a   or Val or Glu or Met or His
  Misc_feature (43)..(43): location 43 can be a   or Asp
  Misc_feature (44)..(44): location 44 can be a   or Asp or Pro or Ser
  Misc_feature (45)..(45): location 45 can be a   or Asp or Leu or Gly
  Misc_feature (46)..(46): location 46 can be a   or Asp or Phe or His
  Misc_feature (47)..(47): location 47 can be a   or Asp or Glu or Pro or Gly
  Misc_feature (48)..(48): location 48 can be a   or Asp or Phe or Thr
  Misc_feature (49)..(49): location 49 can be a   or Glu or Gln or His
  Misc_feature (50)..(50): location 50 can be a   or Glu or Leu or Phe or Met or Thr
  Misc_feature (51)..(51): location 51 can be a   or Pro or Ser or Thr
  Misc_feature (52)..(52): location 52 can be a   or Ile or Asp or Glu or Ala or Thr
  Misc_feature (53)..(53): location 53 can be a   or Ala or Ser
  Misc_feature (54)..(54): location 54 can be a   or Asn or Lys or Thr
  Misc_feature (55)..(55): location 55 can be a   or Ala or Ser or Thr
  Misc_feature (56)..(56): location 56 can be Asn or a   or Lys or Ala or Ser
  Misc_feature (57)..(57): location 57 can be Asn or a   or Ser or Thr
  Misc_feature (58)..(58): location 58 can be a   or Asp or Glu or Gln or Thr
  Misc_feature (59)..(59): location 59 can be a   or Ser or Thr
  Misc_feature (60)..(60): location 60 can be a   or Lys or Leu or Ser or Thr
  Misc_feature (61)..(61): location 61 can be a   or Ile or Ala or Thr
  Misc_feature (62)..(62): location 62 can be a   or Ile or Leu or Ser or Gly
  Misc_feature (63)..(63): location 63 can be a   or Glu or Ala or Phe
  Misc_feature (64)..(64): location 64 can be a   or Leu or Ala or Arg
  Misc_feature (65)..(65): location 65 can be a   or Tyr or Arg
  Misc_feature (66)..(66): location 66 can be a   or Asn or Phe
  Misc_feature (67)..(67): location 67 can be a   or Arg or Gly
  Misc_feature (68)..(68): location 68 can be a   or Lys or Thr
  Misc_feature (69)..(69): location 69 can be a   or Asp or Ser
  Misc_feature (70)..(70): location 70 can be a   or Ile or Arg
  Misc_feature (71)..(71): location 71 can be a   or Trp or Gln
  Misc_feature (72)..(72): location 72 can be a   or Thr or Gly
  Misc_feature (73)..(73): location 73 can be Ile
  Misc_feature (74)..(74): location 74 can be Pro
  Misc_feature (75)..(75): location 75 can be Trp
  Misc_feature (76)..(76): location 76 can be Glu
  Misc_feature (77)..(77): location 77 can be Ser or Arg
  Misc_feature (78)..(78): location 78 can be Leu
  Misc_feature (79)..(79): location 79 can be Asn or Gln
  Misc_feature (80)..(80): location 80 can be Ile or Tyr
  Misc_feature (81)..(81): location 81 can be Ser or Thr
  Misc_feature (82)..(82): location 82 can be Arg
  Misc_feature (83)..(83): location 83 can be Asn or Lys or Asp
  Misc_feature (84)..(84): location 84 can be Asp or Lys or Gln or Arg
  Misc_feature (85)..(85): location 85 can be Tyr
  Misc_feature (86)..(86): location 86 can be Arg
  Misc_feature (87)..(87): location 87 can be Tyr or Lys or Glu
  Misc_feature (88)..(88): location 88 can be Asn or Lys or Ala or Met or Thr
  Misc_feature (89)..(89): location 89 can be Arg
  Misc_feature (90)..(90): location 90 can be Leu
  Misc_feature (91)..(91): location 91 can be Lys or Glu or Gln or Leu or Arg
  Misc_feature (92)..(92): location 92 can be Gln or His
  Misc_feature (93)..(93): location 93 can be Tyr
  Misc_feature (94)..(94): location 94 can be Lys
  Misc_feature (95)..(95): location 95 can be Asn
  Misc_feature (96)..(96): location 96 can be Tyr or Phe
  Misc_feature (97)..(97): location 97 can be Glu or Gln
  Misc_feature (98)..(98): location 98 can be Ile or Asn or Ser
  Misc_feature (99)..(99): location 99 can be Leu or Phe
  Misc_feature (100)..(100): location 100 can be Pro or Phe or Ser or Thr
  Misc_feature (101)..(101): location 101 can be Gln or Leu or Met or Arg
  Misc_feature (102)..(102): location 102 can be Pro or Ser
  Misc_feature (103)..(103): location 103 can be Pro or Arg or Gly
  Misc_feature (104)..(104): location 104 can be Asp or Glu or Gln or His
  Misc_feature (105)..(105): location 105 can be Asp or Glu or Leu or His or Gly
  Misc_feature (106)..(106): location 106 can be Leu or Met
  Misc_feature (107)..(107): location 107 can be Asp or Glu or Arg or His
  Misc_feature (108)..(108): location 108 can be Lys
  Misc_feature (109)..(109): location 109 can be Glu or Leu
  Misc_feature (110)..(110): location 110 can be Cys
  Misc_feature (111)..(111): location 111 can be Lys or Leu or Phe
  Misc_feature (112)..(112): location 112 can be Glu or Gln
  Misc_feature (113)..(113): location 113 can be Val
  Misc_feature (114)..(114): location 114 can be Glu or Gln
  Misc_feature (115)..(115): location 115 can be Lys or Ser or Arg
  Misc_feature (116)..(116): location 116 can be Lys or Ser or Gly
  Misc_feature (117)..(117): location 117 can be Lys or Asp or Glu or Gln or Ser
  Misc_feature (118)..(118): location 118 can be Asn or Lys or His or Thr
  Misc_feature (119)..(119): location 119 can be Tyr or Phe
  Misc_feature (120)..(120): location 120 can be Tyr
  Misc_feature (121)..(121): location 121 can be Asp or Glu
  Misc_feature (122)..(122): location 122 can be Phe
  Misc_feature (123)..(123): location 123 can be Gln or Phe or His
  Misc_feature (124)..(124): location 124 can be Tyr or Leu or Phe
  Misc_feature (125)..(125): location 125 can be Asn
  Misc_feature (126)..(126): location 126 can be Thr
  Misc_feature (127)..(127): location 127 can be Arg
  Misc_feature (128)..(128): location 128 can be Ile or Leu
  Misc_feature (129)..(129): location 129 can be Val
  Misc_feature (130)..(130): location 130 can be Lys or Arg
  Misc_feature (131)..(131): location 131 can be Xaa or Pro or Ser
  Misc_feature (132)..(132): location 132 can be Ser or Thr
  Misc_feature (133)..(133): location 133 can be Ile or Leu
  Misc_feature (134)..(134): location 134 can be Val or Leu or Ala
  Misc_feature (135)..(135): location 135 can be His or Gly
  Misc_feature (136)..(136): location 136 can be Pro or Phe
  Misc_feature (137)..(137): location 137 can be Asn or Gln
  Misc_feature (138)..(138): location 138 can be Ile or Leu
  Misc_feature (139)..(139): location 139 can be Gln or Leu or Met or Arg
  Misc_feature (140)..(140): location 140 can be Asn or a   or Xaa or Pro or Leu or Arg
  Misc_feature (141)..(141): location 141 can be Asn or a   or Gln or Arg or Gly
  Misc_feature (142)..(142): location 142 can be a   or Val or Trp or Arg
  Misc_feature (143)..(143): location 143 can be a   or Asn or Xaa or Thr
  Misc_feature (144)..(144): location 144 can be a   or Val or Xaa or Met
  Misc_feature (145)..(145): location 145 can be a   or Ser
  Misc_feature (146)..(146): location 146 can be a   or Ser
  Misc_feature (147)..(147): location 147 can be a   or Leu
  Misc_feature (148)..(148): location 148 can be a   or Ala
  Misc_feature (149)..(149): location 149 can be a   or Gly
  Misc_feature (150)..(150): location 150 can be a   or Pro
  Misc_feature (151)..(151): location 151 can be a   or Asn or Tyr
  Misc_feature (152)..(152): location 152 can be a   or Ile
  Misc_feature (153)..(153): location 153 can be a   or Met
  Misc_feature (154)..(154): location 154 can be a   or Leu
  Misc_feature (155)..(155): location 155 can be a   or Arg
  Misc_feature (156)..(156): location 156 can be a   or Asn
  Misc_feature (157)..(157): location 157 can be Leu
  Misc_feature (158)..(158): location 158 can be Val or Leu
  Misc_feature (159)..(159): location 159 can be Trp
  Misc_feature (160)..(160): location 160 can be Ala
  Misc_feature (161)..(161): location 161 can be Thr
  Misc_feature (162)..(162): location 162 can be Ser or Thr
  Misc_feature (163)..(163): location 163 can be Lys
  Misc_feature (164)..(164): location 164 can be His
  Misc_feature (165)..(165): location 165 can be Asp
  Misc_feature (166)..(166): location 166 can be Val
  Misc_feature (167)..(167): location 167 can be Tyr
  Misc_feature (168)..(168): location 168 can be Leu or Phe
  Misc_feature (169)..(169): location 169 can be Met
  Misc_feature (170)..(170): location 170 can be Asn or Lys or Gln or Ser
  Misc_feature (171)..(171): location 171 can be Asn or Asp
  Misc_feature (172)..(172): location 172 can be Tyr or Ser
  Misc_feature (173)..(173): location 173 can be Ser or Thr
  Misc_feature (174)..(174): location 174 can be Val or Leu
  Misc_feature (175)..(175): location 175 can be Met or Gly
  Misc_feature (176)..(176): location 176 can be His
  Misc_feature (177)..(177): location 177 can be Trp
  Misc_feature (178)..(178): location 178 can be Ser
  Misc_feature (179)..(179): location 179 can be Ala or Ser
  Misc_feature (180)..(180): location 180 can be Leu
  Misc_feature (181)..(181): location 181 can be Leu or Ser
  Misc_feature (182)..(182): location 182 can be Gln or His or Arg
  Misc_feature (183)..(183): location 183 can be Lys or Arg
  Misc_feature (184)..(184): location 184 can be Met or Ser or Gly
  Misc_feature (185)..(185): location 185 can be Lys or Thr
  Misc_feature (186)..(186): location 186 can be Asp or Glu
  Misc_feature (187)..(187): location 187 can be Val
  Misc_feature (188)..(188): location 188 can be Leu
  Misc_feature (189)..(189): location 189 can be Asn or Asp
  Misc_feature (190)..(190): location 190 can be Val or Phe
  Misc_feature (191)..(191): location 191 can be Ala or Ser
  Misc_feature (192)..(192): location 192 can be Lys or Gly
  Misc_feature (193)..(193): location 193 can be Gln or Pro or His
  Misc_feature (194)..(194): location 194 can be Ile or Val or Leu
  Misc_feature (195)..(195): location 195 can be Ile or Val or Ala
  Misc_feature (196)..(196): location 196 can be Pro
  Misc_feature (197)..(197): location 197 can be Ala or Ser or Thr
  Misc_feature (198)..(198): location 198 can be Lys or Gln or Leu or Met
  Misc_feature (199)..(199): location 199 can be Asn or Lys or Thr
  Misc_feature (200)..(200): location 200 can be Val or Gln or Arg or His
  Misc_feature (201)..(201): location 201 can be Pro or His or Arg
  Misc_feature (202)..(202): location 202 can be a   or Gly
  Misc_feature (203)..(203): location 203 can be a   or Leu or Phe or Ser or Cys
  Misc_feature (204)..(204): location 204 can be Ala or Leu or Gly
  Misc_feature (205)..(205): location 205 can be Leu or Ala or Ser
  Misc_feature (206)..(206): location 206 can be Glu or Gln or Met
  Misc_feature (207)..(207): location 207 can be Pro or Ser or Gly
  Misc_feature (208)..(208): location 208 can be Ile or Val or Leu or Phe
  Misc_feature (209)..(209): location 209 can be Ser or Thr
  Misc_feature (210)..(210): location 210 can be Arg or Gly
  Misc_feature (211)..(211): location 211 can be Val
  Misc_feature (212)..(212): location 212 can be Gln
  Misc_feature (213)..(213): location 213 can be Ile or Val
  Misc_feature (214)..(214): location 214 can be Ser
  Misc_feature (215)..(215): location 215 can be Thr
  Misc_feature (216)..(216): location 216 can be Leu or Met
  Misc_feature (217)..(217): location 217 can be Ala or Thr
  Misc_feature (218)..(218): location 218 can be Val
  Misc_feature (219)..(219): location 219 can be Asn or Lys
  Misc_feature (220)..(220): location 220 can be Asp or Glu or Gly
  Misc_feature (221)..(221): location 221 can be Asn or Asp or Gly
  Misc_feature (222)..(222): location 222 can be Leu
  Misc_feature (223)..(223): location 223 can be Ile or Lys or Leu or Met
  Misc_feature (224)..(224): location 224 can be Val or Leu
  Misc_feature (225)..(225): location 225 can be Ala or Arg
  Misc_feature (226)..(226): location 226 can be Glu or Gly
  Misc_feature (227)..(227): location 227 can be Gly
  Misc_feature (228)..(228): location 228 can be Xaa or Phe or Ser
  Misc_feature (229)..(229): location 229 can be a   or Lys or Gln
  Misc_feature (230)..(230): location 230 can be Glu or Ser or Gly
  Misc_feature (231)..(231): location 231 can be Glu or Ser or Arg
  Misc_feature (232)..(232): location 232 can be Val or Leu
  Misc_feature (233)..(233): location 233 can be Ile or Val or Ser
  Misc_feature (234)..(234): location 234 can be Val or Leu or Cys
  Misc_feature (235)..(235): location 235 can be Tyr or Lys or Arg
  Misc_feature (236)..(236): location 236 can be Asn or Tyr or Val or Lys or Arg or Ser
  Misc_feature (237)..(237): location 237 can be Ile or Val or Leu or Ser or Gly
  Misc_feature (238)..(238): location 238 can be Asn or Asp or Lys or Leu or Gly or Thr
  Misc_feature (239)..(239): location 239 can be Asn or Ile or Lys or Glu or Gln or His
  Misc_feature (240)..(240): location 240 can be Ile or Leu or Pro or Arg
  Misc_feature (241)..(241): location 241 can be Ile or Asp or Arg or Gly
  Misc_feature (242)..(242): location 242 can be Val or Leu or Ser
  Misc_feature (243)..(243): location 243 can be Tyr or Lys or Ala or Leu
  Misc_feature (244)..(244): location 244 can be Phe or Ser
  Misc_feature (245)..(245): location 245 can be Ala or His or Cys
  Misc_feature (246)..(246): location 246 can be Leu or Ser or Thr or Gly
  Misc_feature (247)..(247): location 247 can be Asn or Ile or Val or Lys or Arg
  Misc_feature (248)..(248): location 248 can be Ile or a   or Leu or Thr
  Misc_feature (249)..(249): location 249 can be a   or His or Thr
  Misc_feature (250)..(250): location 250 can be a   or Leu or Arg or Gly or Thr
  Misc_feature (251)..(251): location 251 can be Asn or a   or Asp or Phe or Ser
  Misc_feature (252)..(252): location 252 can be Asn or a   or Asp or Xaa or Gly
  Misc_feature (253)..(253): location 253 can be Asn or a
  Misc_feature (254)..(254): location 254 can be Asn or a   or Ala or Ser
  Misc_feature (255)..(255): location 255 can be Ile or a   or Asp
  Misc_feature (256)..(256): location 256 can be Ile or a   or Thr
  Misc_feature (257)..(257): location 257 can be Asn or a   or His or Thr
  Misc_feature (258)..(258): location 258 can be Asn or a   or Ala
  Misc_feature (259)..(259): location 259 can be a   or Val or Ser or Met
  Misc_feature (260)..(260): location 260 can be a   or Val or Xaa
  Misc_feature (261)..(261): location 261 can be a   or Asp
  Misc_feature (262)..(262): location 262 can be Ile or a   or Val
  Misc_feature (263)..(263): location 263 can be a   or Tyr or His
  Misc_feature (264)..(264): location 264 can be Asn or a   or Gln or Arg or Ser
  Misc_feature (265)..(265): location 265 can be Asn or a   or Ala or Ser
  Misc_feature (266)..(266): location 266 can be a   or Pro or Thr
  Misc_feature (267)..(267): location 267 can be Asn or a   or Ala or Ser
  Misc_feature (268)..(268): location 268 can be a   or Gly
  Misc_feature (269)..(269): location 269 can be a   or Ser or Gly
  Misc_feature (270)..(270): location 270 can be a   or Glu or Leu or Thr
  Misc_feature (271)..(271): location 271 can be a   or Arg or Gly
  Misc_feature (272)..(272): location 272 can be Asn or Ile or a   or Val
  Misc_feature (273)..(273): location 273 can be Ile or a   or Pro or Thr
  Misc_feature (274)..(274): location 274 can be a   or Val or Ala or Thr
  Misc_feature (275)..(275): location 275 can be a   or Ala or Ser
  Misc_feature (276)..(276): location 276 can be Asn or a   or Xaa
  Misc_feature (277)..(277): location 277 can be Asn or a
  Misc_feature (278)..(278): location 278 can be a   or Asp
  Misc_feature (279)..(279): location 279 can be a   or Phe or Ser or Cys
  Misc_feature (280)..(280): location 280 can be a   or Val or Gln or Thr or Gly
  Misc_feature (281)..(281): location 281 can be a   or Val or Ala or Gly
  Misc_feature (282)..(282): location 282 can be a   or Ser or Arg
  Misc_feature (283)..(283): location 283 can be a   or Val or Glu or Gly or Thr
  Misc_feature (284)..(284): location 284 can be a   or Leu or Phe
  Misc_feature (285)..(285): location 285 can be a   or Asp
  Misc_feature (286)..(286): location 286 can be a   or Ala or Met or Thr
  Misc_feature (287)..(287): location 287 can be a   or Xaa or Glu
  Misc_feature (288)..(288): location 288 can be Asn or a   or Arg
  Misc_feature (289)..(289): location 289 can be a   or Phe
  Misc_feature (290)..(290): location 290 can be a   or Gln or Ala or Ser
  Misc_feature (291)..(291): location 291 can be a   or Leu or Phe or Ser
  Misc_feature (292)..(292): location 292 can be Ile or a   or Leu
  Misc_feature (293)..(293): location 293 can be Asn or a   or Ser or Gly
  Misc_feature (294)..(294): location 294 can be a   or Trp or Ser or His or Cys
  Misc_feature (295)..(295): location 295 can be a   or Phe
  Misc_feature (296)..(296): location 296 can be a   or Lys or Ala or Arg or Thr
  Misc_feature (297)..(297): location 297 can be a   or Tyr or Leu or Phe
  Misc_feature (298)..(298): location 298 can be Asn or a   or Asp or Pro
  Misc_feature (299)..(299): location 299 can be a   or Trp
  Misc_feature (300)..(300): location 300 can be a   or Pro or Ser
  Misc_feature (301)..(301): location 301 can be a   or Val
  Misc_feature (302)..(302): location 302 can be Asn or a
  Misc_feature (303)..(303): location 303 can be Asn or a   or His
  Misc_feature (304)..(304): location 304 can be a   or Thr
  Misc_feature (305)..(305): location 305 can be a   or Ser
  Misc_feature (306)..(306): location 306 can be a   or Val
  Misc_feature (307)..(307): location 307 can be a   or Ser
  Misc_feature (308)..(308): location 308 can be a   or Pro
  Misc_feature (309)..(309): location 309 can be a   or Asp
  Misc_feature (310)..(310): location 310 can be a   or Lys or Gly
  Misc_feature (311)..(311): location 311 can be a   or Lys
  Misc_feature (312)..(312): location 312 can be a   or Leu
  Misc_feature (313)..(313): location 313 can be a   or Leu
  Misc_feature (314)..(314): location 314 can be a   or Ala
  Misc_feature (315)..(315): location 315 can be a   or Val
  Misc_feature (316)..(316): location 316 can be a   or Val or Leu
  Misc_feature (317)..(317): location 317 can be a   or Gly
  Misc_feature (318)..(318): location 318 can be a   or Asp
  Misc_feature (319)..(319): location 319 can be a   or Asp or Ser
  Misc_feature (320)..(320): location 320 can be a   or Arg or Ser or Thr
  Misc_feature (321)..(321): location 321 can be a   or Asp or Glu
  Misc_feature (322)..(322): location 322 can be a   or Ala or Cys
  Misc_feature (323)..(323): location 323 can be a   or Leu
  Misc_feature (324)..(324): location 324 can be Ile or a   or Leu
  Misc_feature (325)..(325): location 325 can be a   or Val or Ala
  Misc_feature (326)..(326): location 326 can be a   or Asp
  Misc_feature (327)..(327): location 327 can be a   or Ala or Ser
  Misc_feature (328)..(328): location 328 can be Asn or a   or Gln or Arg
  Misc_feature (329)..(329): location 329 can be Asn or a   or Ser or Thr
  Misc_feature (330)..(330): location 330 can be a   or Gly
  Misc_feature (331)..(331): location 331 can be a   or Lys
  Misc_feature (332)..(332): location 332 can be Ile or a   or Val or Glu
  Misc_feature (333)..(333): location 333 can be a   or Met or Thr
  Misc_feature (334)..(334): location 334 can be a   or Ala or Ser or Gly
  Misc_feature (335)..(335): location 335 can be a   or Ser or Arg or Thr
  Misc_feature (336)..(336): location 336 can be a   or Leu
  Misc_feature (337)..(337): location 337 can be a   or Val or Lys
  Misc_feature (338)..(338): location 338 can be a   or Gly
  Misc_feature (339)..(339): location 339 can be a   or His
  Misc_feature (340)..(340): location 340 can be a   or Leu
  Misc_feature (341)..(341): location 341 can be a   or Asp
  Misc_feature (342)..(342): location 342 can be a   or Tyr
  Misc_feature (343)..(343): location 343 can be a   or Ser
  Misc_feature (344)..(344): location 344 can be a   or Phe
  Misc_feature (345)..(345): location 345 can be a   or Ala or Ser
  Misc_feature (346)..(346): location 346 can be a   or Ser
  Misc_feature (347)..(347): location 347 can be a   or Ala
  Misc_feature (348)..(348): location 348 can be a   or Trp
  Misc_feature (349)..(349): location 349 can be a   or His
  Misc_feature (350)..(350): location 350 can be a   or Leu or Pro
  Misc_feature (351)..(351): location 351 can be a   or Asp
  Misc_feature (352)..(352): location 352 can be a   or Gly
  Misc_feature (353)..(353): location 353 can be a   or Val or Gln or Arg
  Misc_feature (354)..(354): location 354 can be Ile or a   or Val or Thr
  Misc_feature (355)..(355): location 355 can be a   or Val or Leu or Phe
  Misc_feature (356)..(356): location 356 can be a   or Ala
  Misc_feature (357)..(357): location 357 can be a   or Thr
  Misc_feature (358)..(358): location 358 can be a   or Gly
  Misc_feature (359)..(359): location 359 can be Asn or a
  Misc_feature (360)..(360): location 360 can be a   or Gln
  Misc_feature (361)..(361): location 361 can be a   or Asp
  Misc_feature (362)..(362): location 362 can be a   or Lys or Arg
  Misc_feature (363)..(363): location 363 can be a   or Thr
  Misc_feature (364)..(364): location 364 can be a   or Cys
  Misc_feature (365)..(365): location 365 can be a   or Arg
  Misc_feature (366)..(366): location 366 can be a   or Val or Leu
  Misc_feature (367)..(367): location 367 can be a   or Trp
  Misc_feature (368)..(368): location 368 can be a   or Asp
  Misc_feature (369)..(369): location 369 can be Ile or a   or Val
  Misc_feature (370)..(370): location 370 can be a   or Arg
  Misc_feature (371)..(371): location 371 can be Asn or a
  Misc_feature (372)..(372): location 372 can be a   or Pro or Leu or Met
  Misc_feature (373)..(373): location 373 can be a   or Ser
  Misc_feature (374)..(374): location 374 can be a   or Gln or Arg or Thr
  Misc_feature (375)..(375): location 375 can be a   or Ser
  Misc_feature (376)..(376): location 376 can be a   or Val or Leu or Met
  Misc_feature (377)..(377): location 377 can be a   or Ala
  Misc_feature (378)..(378): location 378 can be a   or Val
  Misc_feature (379)..(379): location 379 can be a   or Leu
  Misc_feature (380)..(380): location 380 can be a   or Lys or Glu or Arg
  Misc_feature (381)..(381): location 381 can be a   or Gly
  Misc_feature (382)..(382): location 382 can be Asn or a   or Arg
  Misc_feature (383)..(383): location 383 can be Ile or a   or Met
  Misc_feature (384)..(384): location 384 can be a   or Gly
  Misc_feature (385)..(385): location 385 can be a   or Ala
  Misc_feature (386)..(386): location 386 can be Ile or a   or Val
  Misc_feature (387)..(387): location 387 can be a   or Arg
  Misc_feature (388)..(388): location 388 can be a   or Ala or Cys or Gly
  Misc_feature (389)..(389): location 389 can be Ile or a   or Leu
  Misc_feature (390)..(390): location 390 can be a   or Arg
  Misc_feature (391)..(391): location 391 can be a   or Tyr or Phe
  Misc_feature (392)..(392): location 392 can be a   or Ser or Thr
  Misc_feature (393)..(393): location 393 can be a   or Pro or Ser
  Misc_feature (394)..(394): location 394 can be a   or Asp
  Misc_feature (395)..(395): location 395 can be a   or Gly
  Misc_feature (396)..(396): location 396 can be a   or Arg
  Misc_feature (397)..(397): location 397 can be a   or Phe
  Misc_feature (398)..(398): location 398 can be a   or Leu
  Misc_feature (399)..(399): location 399 can be a   or Leu or Ala
  Misc_feature (400)..(400): location 400 can be a   or Ala or Phe or Met
  Misc_feature (401)..(401): location 401 can be a   or Ala or Ser
  Misc_feature (402)..(402): location 402 can be a   or Glu
  Misc_feature (403)..(403): location 403 can be a   or Pro
  Misc_feature (404)..(404): location 404 can be a   or Ala
  Misc_feature (405)..(405): location 405 can be a   or Asp
  Misc_feature (406)..(406): location 406 can be a   or Phe
  Misc_feature (407)..(407): location 407 can be a   or Val
  Misc_feature (408)..(408): location 408 can be a   or His
  Misc_feature (409)..(409): location 409 can be Ile or a   or Val
  Misc_feature (410)..(410): location 410 can be a   or Tyr or Phe
  Misc_feature (411)..(411): location 411 can be a   or Asp or Ser
  Misc_feature (412)..(412): location 412 can be a   or Ala or Ser or Thr
  Misc_feature (413)..(413): location 413 can be a   or Ala or His
  Misc_feature (414)..(414): location 414 can be a   or Glu or Ala or Ser
  Misc_feature (415)..(415): location 415 can be a   or Cys or Gly
  Misc_feature (416)..(416): location 416 can be a   or Tyr
  Misc_feature (417)..(417): location 417 can be a   or Glu or Ala or Arg
  Misc_feature (418)..(418): location 418 can be a   or Lys or Asp or Gln
  Misc_feature (419)..(419): location 419 can be a   or Ala or Arg or Gly
  Misc_feature (420)..(420): location 420 can be a   or Gln
  Misc_feature (421)..(421): location 421 can be a   or Glu
  Misc_feature (422)..(422): location 422 can be Ile or a
  Misc_feature (423)..(423): location 423 can be a   or Asp
  Misc_feature (424)..(424): location 424 can be a   or Leu or Phe
  Misc_feature (425)..(425): location 425 can be a   or Phe
  Misc_feature (426)..(426): location 426 can be a   or Gly
  Misc_feature (427)..(427): location 427 can be a   or Glu
  Misc_feature (428)..(428): location 428 can be Ile or a
  Misc_feature (429)..(429): location 429 can be a   or Ala or Ser
  Misc_feature (430)..(430): location 430 can be a   or Gly
  Misc_feature (431)..(431): location 431 can be Ile or a   or Val
  Misc_feature (432)..(432): location 432 can be a   or Ala or Ser
  Misc_feature (433)..(433): location 433 can be a   or Leu or Phe
  Misc_feature (434)..(434): location 434 can be a   or Ser
  Misc_feature (435)..(435): location 435 can be a   or Pro
  Misc_feature (436)..(436): location 436 can be a   or Asp or Ala
  Misc_feature (437)..(437): location 437 can be a   or Asp or Thr or Gly
  Misc_feature (438)..(438): location 438 can be Asn or a   or Glu
  Misc_feature (439)..(439): location 439 can be Asn or a   or Ala
  Misc_feature (440)..(440): location 440 can be a   or Leu or Gly
  Misc_feature (441)..(441): location 441 can be a   or Phe or Gly
  Misc_feature (442)..(442): location 442 can be a   or Val or Gly
  Misc_feature (443)..(443): location 443 can be a   or Gly
  Misc_feature (444)..(444): location 444 can be Ile or a   or Glu
  Misc_feature (445)..(445): location 445 can be a   or Ala or Ser
  Misc_feature (446)..(446): location 446 can be a   or Asp or Leu
  Misc_feature (447)..(447): location 447 can be a   or Phe or Arg
  Misc_feature (448)..(448): location 448 can be a   or Val or Thr
  Misc_feature (449)..(449): location 449 can be a   or Tyr or Ser or Gly
  Misc_feature (450)..(450): location 450 can be Ile or a   or Val or Gly
  Misc_feature (451)..(451): location 451 can be a   or Ala or Ser or Cys
  Misc_feature (452)..(452): location 452 can be a   or Asp or Leu
  Misc_feature (453)..(453): location 453 can be a   or Leu or Arg
  Misc_feature (454)..(454): location 454 can be a   or Val or Glu or Thr
  Misc_feature (455)..(455): location 455 can be a   or Tyr or Phe
  Misc_feature (456)..(456): location 456 can be Asn or a   or Ala or Gly
  Misc_feature (457)..(457): location 457 can be a   or Arg or Ser
  Misc_feature (458)..(458): location 458 can be a   or Lys or Leu
  Misc_feature (459)..(459): location 459 can be a   or Leu or Arg
  Misc_feature (460)..(460): location 460 can be Asn or a   or Glu or His
  Misc_feature (461)..(461): location 461 can be a   or Tyr or Phe
  Misc_feature (462)..(462): location 462 can be Asn or a   or Arg or His
  Misc_feature (463)..(463): location 463 can be a   or Tyr or Leu or Arg
  Misc_feature (464)..(464): location 464 can be a   or Val or Leu or Arg
  Misc_feature (465)..(465): location 465 can be a   or Asp or His or Arg
  Misc_feature (466)..(466): location 466 can be a   or Ala or Ser or Arg
  Misc_feature (467)..(467): location 467 can be Asn or a   or Phe or His
  Misc_feature (468)..(468): location 468 can be a   or Gly
  Misc_feature (469)..(469): location 469 can be a   or Tyr
  Misc_feature (470)..(470): location 470 can be a   or Leu
  Misc_feature (471)..(471): location 471 can be a   or Asp
  Misc_feature (472)..(472): location 472 can be a   or Ser or Cys
  Misc_feature (473)..(473): location 473 can be a   or Tyr
  Misc_feature (474)..(474): location 474 can be a   or Val or Met
XXXXXXXXXXXXXXXXXXXXXXXXXXXXXXXXXXXXXXXXXXXXXXXXXXXXXXXXXXXXXXXXXXXXXXXGIPWERLNYSRDXYREXRLXQYKNYXNFXXSXXXLXKECXXVXKGXTFYDFXFNTRLVKSTIXHFQLXXXXXXXXXXXXXXXXXNLLWATSKHDVYXMQNYSVMHWSXLLXRXKEVLNVAKPIXPTXKXPGXLAQPVSRVQISTMXVKENLMVAGGFQGELICKXXXXPGVXFCXXXTXXXNXITXAXXDXYXXPXGSXRXXXXXNDXXXXXXDXXXXXXXXXXXXXXXXXXXXXXXXXXXXXXXXXXXXXXXXXXXXXXXXXXXXXXXXXXXXXXXXXXXXXXXXXXXXXXXXXXXXXXXXXXXXXXXXXXXXXXXXXXXXXXXXXXXXXXXXXXXXXXXXXXXXXXXXXXXXXXXXXXXXXXXXXXXXXXXXXXXXXXXXXXXXXXXXXXXXXXXXXXXXX
